United States Patent Application Publication US 2024/0301345 A1 - sequence listing, part 23

SEQ ID NO: 4004 - DNA, 45839 bp, Unknown
  R22_24m  MAG No. k141_59305
ggtctgcgcgctcacccattcgttggcaccggatacgccgatctcgctggtttccagacgaaacgccgacgagaagagcagcagccacgttagccccgtcactacagccacgctgacgacagcaatcaacacgcgtaacgcgacgacacgtacgttcgcacgcttgcgttctttggcgcgttcggtgaaattcaccactttcgggcgtgatacgactcctagggagccggtggtctggtgcagcgtttcggcaacgtaatcctcgctgtgcagccgtcgtgcatcgacgaaggcaccggcctggcccttggctaccgtcacatcgtcgatgatctccggctcgttgatctcatgcccggaagacacggaccggggagcgcgagacttcgacgagtgacccgtgtttccgcgtgaaccgatggtgcgcggcttgcggggacttccggacgaacgacgtgagccgttgtcattgcccccggatctgaccgtgcgcccggacatcactcgcagctttcccgatgggcctcaagtgcggtgagcagcacctgatccatgtcagtgatgtcgcccgcgcccacggtgaagatcacgtcgccgtggtgggcacgcatggccatcatcttggcggccaggcacatatcctcgaccggctgaatccacgtgcctgcggaagcatccttgagtcccgcagccgcgtccacgatggtggaggggctgatgtccgggaaatcggtctgcttttcacgggccgggaagatgccggtgataatgacgtcatcggctttggccaaggattcggcgaactggtgcgcgaagaacttggtgcgggagaacaggtgtggctggaagatcacacgaatggtcgaatcggggtaccggcgtcgggccgcatccagcagggccgcgatttcggtgggatggtgggcgtaatcgtccactacagtgacctgcttgaccgtgccgcgcacctggaagcggcgtgccgcaccgaggaatgtgccggccgccttggccgcgtctgcggggctcacgcccagcagcacggcagcgctgatggcggcggccgcattgcgcgcattgtgcacgccaggaaccttcagggcaacgctctgagacaccggctcccccgccgtcaccgcggccggcagatgcagggtgagctgttcgacgccgctgcctgcggtctcgctttccgaagcgatccagacatacgcggcaccgcccaaatcgggcagggattcacgcgcggtagtgccgtaggcaacggtatgggatttcacgtcggcgggcatggcctccagcacggcaagtccgtcggggtcgtcgatgctgatgatcacgtgaccggtggcccggccggcgtgggcaacgaacgcggcacggtagtgggcttcgtcgccgtaatggtcgagatgatcggcttcacagttggtgataatggcgatggtcggatggtatttggcgaagctgccgtccgattcgtcggcttcggccaccagaatatcgcctttgcccgcgtgtccaccgtccagcgtggtgccgtccgggccttggataaagccgccgatggcgtagcttggatcagcaccggcgttcaccagaatgtgggacagcatggagctggtggtggttttgccatgcgctccggccacggtgacggctcgtttgccgttcatgagcagagcgaggatgtcactgcgatgcacaatgcgcttgcctgccgcgtgcgctgcgacgatttccggattgtccggtttgatggcgctggagtagaccacggtctcggcctgggcgacattttcggctcgctgcccgaattcaacggtgatgcccagcgtttcaagtcggtcggttttggcgctgtgcgcgcgatcggagccgtccaccgcgactccttcggcgtgcagcatttcggccagaacgctcataccggcgccgccgataccgatgaaatgggtggcgccgagatccgcggggcgggccgcagcatcgaacgaggcatacgtggggtcaagcacgatgggctgatcttgagacaattcaaaactcctttggggattccagcaccctatattatgaccgtatctcgtgttgcgggacgggattggtctgtatcgcgcacgggatgatatctgaatactatttggatggttcggctaattgcagaacgtgccgggccatgatttcggcagcgtttctgatgccgtattcccatgccttgcggccgaattcggcaagtcgttcgtgatcggcgagcagatcgggcacatgctcatgcacccactgcggggtcaggtccttgtctgcgaccagaaggccgccgccggcgttcaccactggctcggcattgaaacgctgctcgccgttgccgattggcagcggcacgtaaatggccggcagacccagtgcagccagctcggataccgatccggctccggcgcggcaaatcaccaagtcggcacaggcgaaggccagatcgattcgttccagatattcggcggtatggtagtcaccttgtccggccgattcggggccgatgccggtaagcacgtccgcgccggccgaggccgtgaccagttcgcgtacttcgctgattttgcctcgcccggtcaagtggatgatttgtgcgtgggccaacaggtctgcggcggaggaggcgatggcgcggttcaggctttgcgctcccagcgatccgccagtgaccagcaccagcggacggttcggatcgacgccaagctgcgcggccgattcacggcgtacggcggcacgatcgtcaccgatgcgtttggtcagggaggcgatggtcgggcgcaacggcagaccgacacgctcgacgtcggctccggcacgcggtttgagaccggtgccttcgtacacggtaccgatgaaatcggcccaacgagcgcccagtttattggccatgccggcacgcgcattctgctcatggatggcaatcggaatgcccatcttgtgtgcggtggcgtagacgggggcggaagcatacccgccgaatccggccacgacatccgcatgccgcgtttcaagaatggagcgcaccttggcggtttctcgcttccattttgccgggaagcgaagcatgtacaggtcagggcgacgcgggaacggcactttttcgatggtgtcgagctcgtagccggcctcaggcaccaaatccttctccaaacccaccgcagtgccgatgacggtgacctgtgccgtgggttcgatgtcgcgaatcgccccggcgaccgcgagcagcggattgacatgtccggcggtaccgccgccagcaagaacgatatgtggtgtgccttgattcatgattaccgagtctacttacgcgctctgacgcgactgttttatctgcggttgagaacgcataagtcccacaaccagtccggccgccgtcaagcacatgatcattgatgagccacctgcggagacgaacggcataggcacgcccaataccgggaacacacccacgaccacgccgatgttgaccatggcctggcccacgatccaaatggtgacgcacatcagcaccatggcaacataacgatcggtgacctgcaatgcgatgacgatcatgcaccaggcgagaatcgcgaagaacagcaatacgatggcgcaaccgacgaatccggtctcctcgccgatgatcgcgaaaatgaaatcgttatgggcggccggcaggtaattccatttctcacgcgaattgccgatgcccaatcccagaaagcctccggaggcgatggcgtacttggcgtgaatggactggtagcatacgctctgcgcgtcagcggccgagcaatcaccatatgtggccagaatacgacgcatgcggttcgggctggaaaccgccaatgcaccgaccataaccaccgcgcccaatacgccgattcccatccatttgccggggaatccgacgatcaggaaggccacgcctccgatggagaccagaatcatggccgtgccgaggtccttgccgcccatcaccagcgccacgcctatcgcatacaacaccaacggcgcggcatatgctttgattcccttcttgtggtacatcttgctgcaggcatgcaacgacgagggcagccatatgcacatcgcgaacttcatgaattcggccggctggatagtggtgaagccgaggttcagccaacctttgttgccgtagacgtcgatacccagcggagtaaaggtcagcgcctgcaacaggcaggcacccaccacaaagaacacgccggtccgtttccagaacgtcaccggcatcgtcaatgccacgaagcccagcaccaagccgatcaggcaaaacgcgccctggttcagaagctgaaggaacggcgacttgcccagtgcggccatggtgaccgtggagctggagaacaccatgatcaggccgaagcatgtcagccccaccacggccatgcggaatccgtggtagcaccatagcgggttgagcaagcttcgccaacccgtgtagtcggtgatctcgagtgcgggcctgtcaggggctctgtatgccttacgcttatgggtatcagtggaggccatgcacctcgctccacgtcttggctgcggcggcgaatcgattgcctcgatccgcataggacttgaactggtccatggaggcgcaggccggagccataagcacgatgtcgccggcggcggcatacgtgccgcaggcttcgacggcacgatccatgacggtatcgttgtcttcgggatcgatgatggtcaccgggatgtccggagcttggctggcaaacgcttcgaccatcggctgctggtctttgccgatgatgacggccgctttgatggtatgtgcctggtccttgaccaggtcctcgaatcgactgcccttggccagacctccggcaatccagatcacagacttggccgggaagctggacagcgaggcgcgtgccgcatgaccgttggtggctttggaatcgtccacgaaacgaacggagccgccctcgactgcggcctcagccacggtttcgatgcgatggccgcccggcttgaacgaggtaagcgccttcaacgcggtatctcgatcagcgccaagtcccagcaccaacgccaatgccgtcaatgcatcggccaccagatgcgggtacagtgagccgtccggctctgccagatgcgtgaaatcggtgatggcggccagtctgaccggctcccccactgcgccgccggccacgccgctcctgtccacgatccagccatcttcaatgccgatctgaccggcctggggggcctcgagcgtgaatcccaccttgcggcatccttcggcggtttgggcctcggccgccagttcgctgactttggcgtcctgcgcattgtagacgatggcgcgtttggcgttgtggaacaccttggatttgtcggcggcgtaattctcgcgcccgccatgccagtcgaggtgatcgtcggcgatattggtgatcgccgcgcagtcaagtgccagcgaatcggtgaagtgcaattggaaggagctcagttccacgcacagtacgtcgtgctgaggattggtggcgcaacgagacaggctcatgctcatgtctccggaggcgatattaccggcggtcggcgcgtcgagtccgcaggcggtgagcatttccgaggtcatctcggtggtggaggttttgccgttggtgccggtgatgccgatccatggagccggagtaccggtgcgctcgttattcacacgcagctgccatgcgaattccacctcgctcatcacggggatgccacggcgttgggcttccagcacgaacggggtgcgggggttgaacaccggggacgacatgacgtagtccacatggtcccagtccacgtcatcaaaggagcggagaccggcctcgggcttcctctcatcgacgccaatcacgtgggcgccgcattccctcaatacctccgccaacgaggtgccggacacacccagtccagcgatcaccactgtcttatccgctacttgcattgttcctcctgatataggaattccgtgggtgagcataatcccacccagatttccgctagctgaacagcaggccggagcgggtgacccagtcgccgtagaaaatcgtcagggcgagcagcacgaagatgagttcgatcatccagaaccgcaccaccaccttggtttcggtccaacccttcagttcgaaatgatggtggatcggtgccatcttgaatacacgtttgtgggtcatcttgaagtacccgacctggatgacgtcgctcatggcttccatgacgtacagtccacccagaaccaccgccaggaattcggtgtgcgtggcgatggacagggctgcgaacagaccacccaaggccagggaaccggtatcacccatgaaaatcgatgcggggttcgagttgtaccacaggaagccgaagcaggcgacggccgcgcatacggcgatgacggtcagatcgagaggatcggacacagcataggaatagccgccatggctgccgcccttgatgtggtagctttcccagaatgcgatgatgccaaaaccggtgaaggcgatcatcgacgaacctgccgccagaccgtcaagcccatccgtcagattcactgcgttggtccatgcggtcatcaggaagttcacccagatgacgaacaggatgatggttacggcacggccggcgaagtcgaagttgaagaacggctgttcgatgaagctgatgcccgcctgcgcactggggaatcccgatttggtgggaatcagcagcgcaagtaccgcgtagatggtggcgaagatgaactggccgatgaacttgccgcccaccgataggccttcgttctgcttcttacgcaccttggcgaagtcgtcgataaagcccagcagacccatcgacagcatggcgaacagtacgagcaccgcggaccaggagggcacgtcgcccgaacgcaggtatcggtacagtgcggaggatgcccaaccgagcagaatcgcgaagttgatgaccacgccgcccaacgtgggggtgccgcgcttgaccagatgcgactgcggcccatcctggcggatgtactggccatagtgcagcttgtggaccagccgaatcagcagcggggtgccgactaaggtgacgatgagcgacaccagcattccaatgatcagagcaatcacgtgcagcttctctttcttgtcggtttcttggggtggttatcgggtcagttctttgcccagcgttcagccaaagcgctcaggcctgacgcgtgcgatcccttgagcagtaccacagcgtcggaatggttgcgcgccaagtcgatgaccagctgttcggccgcatcgatgtcgtgtacgcaatccaccgacgcggattggctctgacgggcaccgtccgccagagcctgtgccagtgcatcgagatgttggtcttgggcggaaccgaccgcgatgatcgcgtcgatgcccaattcggccgcatacgtgccgatagaggtgtgcaatgccgtctcatcggtgccgagttccagcatggcacccagcagcgccacgcggaacggctccttgccgtcatttgagttccaggccttcaacccgttcaggccggctttcatggagtcgggattggcattgaaggaatcatcgatcagtgtgaaggaagtcccctcgcgattcaccgtggacaatgccatgcgatgagggctgatggtgtgctgcgaggccagaatccgcgccaccgtttcgggtgccataccgtaacgcatcgccacggttgcggcggccaacgcgttcatcacgttgtgacgtccaggaatgcccagatgcaccggcgtatggttgccgtccgcatcgaccaacgtgaattcagcatgatcggaccggtcggcagtgacatcaatggcccgcacctcgggctcctgcgacgatcccaagccgaaccacagcacatcgccgctggccaggccggccatgggaaccacgtgttcgtcatcggcgttcagtaccgcggtgcctccgggaagcagtccctgcacgatttcgcttttcgcctgtgcgatgcgttcgcgggagccgaattctccaaggtgagcgacgccgaccttcaatacgattgccgtgttcggcggtgcgatacgggtcagtcgcgcgatttcgccgatatggctggcacccatctcagccacgaagaaccgggtgtgctcatcgacccgcaacgcagtgagcggcaggccgatctcattgttgaacgatcccaccggagccacggtcgggcctacggtggcaagcagggaggagagcagatccttggtggtggtcttgcccaccgaaccggtcaatccgatgatgtcgaagtcgccgtccagctcgcggcggcgaacgatgttgtgtcgggcgagctcgccaagggcgtcgaccgtgtctttcactacgatctgcggcaggccatcggactccacctcatggtcgacgatggccaccgtggctccctgttcagcggttttcgccacaaagtcatgcccatcgacacgctcgcctcggatggccacaaacaccgatccggggccggcctgccgcgagtcgctgaccgtattggtggctcgagactcggaatcggcgtctccgatcaatcgaccatcgacggccttggcgatctcctccacactcatcggaaccatggtgtttcaaactcctttacgattacgcttcgtcccgcatccacggacttaattgagattgttggccacatgcagggcactgcgtatgttgtttttcctcacgccggcggccagtaccatggcgatggccaaggacatgtgcccgagtcggacgcggtcgtacattgccggtgaatccgcagccatttcatccgattcgggtgtcgacgaggtcatggacatgtcatgttccgcaacgaatgcgtagcgtgtcttcaattcgtccaagcttgcgcttgcgttgacatcttccgtgcccagcacatccacgttcaccgattccaacgcatgctcggccaatgtgcggtcatccatggcgatgatcacggccgccacaccgtcttcggcgcacacggacagcgcgcgctgcatatcgaggatgcccagaggatagttcaggttcatggtacgtgtcatcgacgtggacccggatgcggtgattaccgccaccggattgcccagcatgtgcaggaattcggagagctgggacacgcctgcgtcaacggcctgctcatccgcaccggtcaccgcgaacaccgccatggcgttggatggtccgccggccaggccgctggccagatcgccgagtacgcgatcgtcgaaatcgccgtagagcaacggtatatcggcattggcgatctgccctttggacgcgcgtggcagcaacgccgcataggcaccggcctgtgcggcatgcagcacatcgggttcctgctcatgcgtgcagatgaacagcgagccgggaatcacggtatccacggcatcgctgagtgaggtaatggtgacattggtggcgaagggtggatcgacttcaaaaccgtaccgttcgaccagcattcccaaggtcacccgctgggcgatggattcgctcactgcactcatgggctagcgcctttctcccctgatccttaccacgtgactggaatagcattttttcgtggactggagacaggcacctcgtatttctgcataaggaactcacaaatctgtgcggaaacagggccggccgtcagaccgccgaacacaccattcggatccttcatcaccacggtgaccgcatagcgcgggttgtccgcgggaatcaccacggaataatcggagataatggacgagagcgcgccatccgaaccctgcacctctgcggtaccggacttggcggccatgcggtaaccatcgaccttgacgaacttgttgtagctttccgccactgattccatcgcattcatcatgtccgatgcgaccttttcatccaccacgcgggtggcttcgcccttcttggtctcagtggtcttgccattggtatcggtggttgatctgatgatcgactgctgctgcttgacacccttgttcgcgatggtggccaccacgttgttgagctgcagggcgttgacggtgtagccctgaccaaacaggatggtgttgcgcgtacgcagatcccacgccgaagggttggtgagcagaccgctcgattcaccgggcaggttcagtccggtcggttgtccgatgccgaatttggtcaggtactcgtagcgttgctcatccggatagttctccccggccataatcatgccgacgttcgatgagttctgcagaataccggcgagcgtccagcgctcagtgccatggtcgaatgagtccttgtaggtctggcccttctgtgtgatgtggtccgggaccgacaattgatcgctcatcttatgcagtcccgtctgcagatagccggacatggagatgaccttgcccaccgaaccaggctcgaaggtttcggacacggcccgagacgggctcatcttcgccgcatcggtaccagcctgtacttcatcgctatcggccagtgcgagaatctccccgctctggacatcctgcaccacggcgatcgcccacgctgcaccatacttggattcggcctccttcaaggcctttttgacataccattgcacatcacggtcaatggtcagggtgacatcgtcgccatttttggccgccaccgattcggtcatggtgccgggaatctcttcgccgccattaccacgctggtaggtttcatggccatcggttccggtaagcgtcttgttctcgacctgctcgatgccggcgacaccatcgccgttgtcgttcacgccgccaagcagcgcgcccatgagatcgccatccgcatacagtctttcactgctcagctcaccccagacaataccgcccaggtgcaacgcctcgatgctgcgcttgacctgtggggtcacgtctttcttcagaatcacatactgcccggtaccggacagatcagcgcccagttccatggcgttcatatccaggactttggccagcagtcggcccacggccgccgctccggtagcacccacgggtttgccgtcaatttcgtggcagtaatcacgggtgttgtcattgcaagtaatcggctcgaactcctgtgcagcctccggattggcgacgatagtataacgctccacgctttgagcgagcacggagccgttggcgtcgaggatacgcccacgcttggcgctcaacgtcacggtcagggtgcggttagccgtggccgcttgtgcggtttgacggccgccgatgagctgggtggaggccagctgaatcacgcatgccgacgccaccaacgccaatgcggcgccgatggcaatgcatttgaacgcgaaggtcttgaccttggcgaactctacgatgcgacgaatggtgttcactgggttccgcctttgttggactggtatccgcttaagtcgatggacactgatccctgttgcgggaccatgcccatgtcgctggccttgtcgggcaggttcgcgactaattgatcgagtttggcctgatcgtcttcgacatcttgggtaagtctgttgatattggtttcgatctgtgccgcctcaaacgagttctgcaccatctgggtacgcaacatcagcgcgccgaacaaggtgccgacgaggaagatcactgcgatggccacgtgcaccagcggtgcgcttcttgttctggtccattcgatgacccgtccgacgacattgccccgctcgtctccacgcgggttggagaccacccgcagctcaggtcgggaggaggactgatgcttggtgtgcggtcggttcgaggccggagccgcgttcgaccgaatgttacgtgcggttgccatatgctgttatcccctccttgtacgaattcgcgctgtgtttttggctctgcccggagacgcggagccttgtatcttgacgtcattcaggccctgcgcggtttgcgtaaagcgtttcctccatcgtgacggaatctcacggctgacttccaccgcccgcaaccgcaccgaagccgatctcgggttggctgcgatttcatgttcgccggccttgatggcacctcgcgtgagatccgtgaaaaacggttgggcatccggcggtatgacaggcagaccagccggaacatccactcgcagcccttgtgccatgaacgatttgacggttttgtcttcgagcgaatgataggactccaccaccagtcgtcccccgacatgcagtcggttcgcggcttgcggcaatgtggaggcgagcttgtccaattcgccgttgacttcaatgcgcaacgcctggaagacgcgtttggcgggattgcccgccgggcggtgggcttgcggcaccacttcatcgaccagacggttgagctgtgcggtggtggtaaacggctccttgtctcgacgtgccacgatggcgcgggcgatctgacgcgagaaacgctcttcaccgtattccttgaatatacggaccagttccgccgcatcataggtggcaagaatccgttcggccgtcaacggctggctgacgtccatgcgcatatccagcggcgcatcatgcgaataggagaagccacgatcggtttcgtcgatctgcaggctagataatcccagatccatgaatacggcgtccacacgttctatgcctcggtccgtcaacacctgatcgagctgatcgaaggcggcatgcaccgggatgaatcgatcggcgagcccctcccgttccatgcgttcggtggccagccccagcgcttcactgtcacggtcaatgccgatgagccgagcctgcggcgcggctttgaggaaggcgatggaatggccggcaaggcccagggtgcaatccgctgcgatggcgttctcatgttccagggcaggcgccatcaggttcacgcaatcgtccagcaataccggcagatgaatattcgccacatcaaccatcagaattccacctccggcaacacatcgtcagcaatatcggaatatccctcttccttctcggcgaggtaggactcccacgtgtccttattccacagttcggcacgggtgccaacgccgatcaccacgacgtcggaacccagattggcgtaatcgcgcagcatctgcggcaccagcacgcggccctgcttgtccggctgctgatcgacggcaccggaaaggaacacacgcaggtattcgcgggcggctttgtttcccaccgacacacgctgaatctgcgaggcgatacggcgaaattcatcgaacggcagcaggtacacgcaccgttcctggcctcgggccatgaccaggccctgccccagctgggagcggaatttggccgggagcgccatacggcctttggcgtcgatcttcggcgtatatgtgccgagaagcagcggcggcagaccagccatgagatcagccatagtggtggagccttgtgcgttggcatcagcgtcgcgaatcgtctgatcggcaaccatggctccacctccttcatcgttacgtgggatacacttcggccaactggttcaccactctaccccacgattccccatttctccccactcatgcacgatttgctcacccttttagggcaattaccgatggattgcgcgtgtcggccacgactgtcgcacgaatgggcgctccgcacatccaatccacgttgcgcactccaccgaccgagcagcatggcgaattcacgctgaattcacctattccgggttgtccgcatcactgacgtagggggtgtgcggtaaatttgaatgccttaagttttttctgccccacggaaatggaacgaagagaacagcatgtcgagttacgcctcccagctgcatgaggagcagcaggccgtcgatcgcgcctatggacgattggatgatctgcgagccgaaatgtggcaacgcctggacaccgtacgcgccgccggctcccacggatcccccacgcaacgcagcgaacgagactcctttgccacaatgtacgaaaaccgcctcacgcaattgcgcagcgttgaggatcggctggtgtttggtcgtctcgacgccaagaacggcgaccgtcattacatcggccgcatcggcctgtcgagcccggaccatgagccgattctgaccgactggcgtgccgaagccgcacgtcctttctatgaggcgaccccctccaatcacggcgacatcgtgatgcgcaggcatatcaccttgagtttccgcgaagtcgtgggcgttgaggatgaggtgctcgacgtgcattccgaccaagtcggccaggcgtcttccgccggcacgttgaccggcgagggtgcgctgctggcttcgctgagctcacgccgcaccggcaagatgaccgatatcgtggccaccattcaggccgagcaggaccgcatcatccgctccgacatgaatcgtgccgtggtggtgcagggcggtcccggcaccggcaagacggccgtggcgctccatcgcgccgcctacctgctgtacacgcaccggcgcacgctggaacgttccggcgtgctggttgttggccccagctcggcgttcctgcactacatcgatcaggtgctgccctctttgggcgagaccggcgtggtctcacgcaccatcagcgatctgattcccggcatcaccgccacggcggtcgactccccttatgcagccaagctcaagggcgatcgacgcatgacctccgtagtggccaatgccatcgccgcacgcgtgcgtgttcccgctgctctgccgacagtaaccattagcggcattcaggtaccaatgctggccactgatatcgagcaggcgcaggcggacgcgaagcgcacccggcaacctcataacaaggcccgcgagacctttatccgttcgatgctgaccagcatgcagaaccgttatgccgaacagcttgattacacgccggatcaggcggagctgaaccgcgcgatgtcgttgctgcgtatgaacgagcaggtgcgcaagaccctgaacctgtgctggctgccgatgaccgccccatggctcatcgatcagctgttcgcccatcccgaacgtctgaagtctctggctggttggctgaccgacaacgacatcgcggcacttgcccgccccaagggctccccgctgacccgctccgatattccgctgctcgacgaagcgatggatatgctgggccccgatcccaagacggtggcctgccagtccgccgccgacgcacgtcgtgccgccgaagagcagtatgccaaagacacgctggccgcgaccggtctgggtggaggcatcgtctccagtcagatgctgctcgaccagatgaacggggacgacgccgagctgaccgcgcagcgggccgcggccgaccgtgaatggacctacgggcacatcgtggtcgacgaagcgcaggaactgaccgccatggactggcgtatgttgatccgccgttgcccctcccgctcgttcaccatcgtgggcgatgtggcgcagacctcggcgctgggtggcacccgacgctggagcaaatcgatgaaccgcctgttcggcgaaagccactgggatctgaacgagttgaccatcaactaccgtaatccgcaggaagtttccgaactcgcctcacgatttgccgagaaggaaggcctctacatctccacggtcaatgcggtgcgcaccatccccgattcggtgtcccgcaatgtggtgcccgacatgtcgtccttgctggaaacgacggccgagcaggcggcgcagcttgccgaacaattcgtttcggcagacggcaccggccgcatcgccgtcatctgtccggatgatctcatcgccccggtgcgcgacgccgtgcgccgcaaactggccgccgttcttgacccggccgaatacgcaaggctcatcgagcagcccgaatgggatgagcaaatcagcgtctgcggcaccgaaacggtcaagggtctggagttcgatgccgtcgtggtggtcgagcccggtctcatcgaggatgacgcgccgagccgcctggtcgccgcctcggacctgtacgtggcaatgaccaggccgacccagaaactggttatagttcggacaagaacggacgaaaagtccctgaacatctaaggtatgaagcatgcccaaagcactgttattggaaaacattcaccccgacgcggccaaatcgctgcgtgatcacggtttcgaagtcgagaccatgaagggagccctgagcgaggacgaactcatcgacgcgctggatggcgtggacttggtgggcgtacgctccaagaccaacgtcacagcccgcgtgctggatgcgcgtcctacgctaagcgccatcggctgcttctgcatcggcaccaatcaggtcgatctggcacatgccggcaagcgtggcatcgccgtgttcaacgccccctactccaacacccgttccgtggtggaattggtgatttgcgacatcatctgcttgatgcgccgcattcccgcacacacgcatcacatcaagcatggcctgtgggacaagtccgcttccggctcgcatgaagtgcgcggcaagacccttggcatcatcggctacggcaacatcggctcccagctgtcggtactggccgaggccctcggcatgcgcgtggtgttctacgacattgaggagaaactggcactgggcaacgcccaccgttgcgataccctcaacgaactgctggaacagtccgatgccgtgaccctgcacgtggatggccgcaagtcgaacaccggcttcttcggcgaagaccaattcgcccacatgaagcaggacgcgattttcattaacctttcgcgcggtttcgtcgccgatctgggagctctgaagcagcacctcgattccggccatctgtctggcgcggcggtcgacgtgttccccgttgagccgaagaagagcggagatccgttcgagacctcactggccaacgaagacaatatgattctgactcctcatattggcggctccaccttggaggctcaggaatccatcggccatttcgtctctcagcgtcttgaggattactggttcaagggttctacctcattgtccgtgaacctaccgcagatcaacctaggtgaacgcaagggcgtgtgccgtatcgcccatctgcacgacaatcttcctggtgtgctggctcatgtcaatcgcgtgctcggcgaagagaacatcaacgtttccttccagtcgttggccaccgaaggcgaacttggctatgtggtcaccgacgtggctcagaagcccagcgccgccacgcttgaagcactacgcaacatcgagggcaccgttcgcatgcgtgtcatcagctgacgcagctcatcctcgattgatatgaaagagacccgtcgctgacgggtctctttcataagtgcagggcttcatgattggttcgcaccatggtttgcgaatcactcgcatatcacggtgcatggcattcgcatattattcacgcaaaccatcaatggcgctttggaaatcctccagacctgcaaagttctggtacacactcgcgaatcgaaggtacgccaccacatccaagtcacgcaacggtttcaggatggctttgcccacttcatctgaggtgacttcggcaaggcctcgggagcgaagatcctcttcgactttctgtcccagcagcttcagatcctcttctctgaccggccgcccctggcaggctttacgtacgccggaaatcactttgtctctgctgaatggctccacgccacccgaacgtttagtgaccagcagcatactggtttccaccgtggtaaaacgcttggtgcatttcgggcatacgcgacgccgacggatggaatgaccgtcatcgctaatgcgcgtatcaataactttggtgtcggggttctggcaaaaagggcaatgcatgctctccagaataacgtgtacgggcggaaaaaccatgccgctcgggtttcatttactcaaccggaacaataatgcgctgcccggcctgcaatgttccggactcgagattgttcagcgtaatcagctcatccactgtttccgatacatcatggccagcaggtgtaatagccgaagcatatgaccagagcgtatcccccggccgcacgatatagctggtcacctgcgtggcacccgtatctgattgggcccgctgagcggtaagcgcgccgaaaccacaccaggccagcgccaaggcgatcatcactgcgataatccgcccacgcacattccggcgggacgttccagcatgctgcatagctacacgtgcgctacgggccggggccatcaccattgaaccagtcatcacgaccacctctctcgaacagatgttctatcgaacaactgttcttataatggcacaaatgttcgacacggtcaagtcgaaactcgaacagatgtttgatttcacacgaacaacacgttatgctggtgacataacgaaaggagccctgacgtgagcaccattcccctctcccccaagcagaagccggacgagtccaccctgaccgaccgccagcgcaaagtgttggacgccattcgcacgcatatcgacgaacaaggctttgctccctctttccgggagatcggaaatgccgccgggctcaaaagtccgtcttcggtcaagcatcagctacaagttttggaagacaagggcttcattcgcatgaacgcgaacaagggtcgcgccatcgaggtgatggcaggatccgccccgaatgccgaaaagccatcacaagccagcgaagaggcaaccagcgccagcaatgtggcggagatataccaattccccgccgaagccattgccgaatcacatgacgtaccgctcgttggccgtattgccgccggcgtgccgattaccgccgaacagcatgtggacgacgtcatgcgtctgcctgaacggctgaccggctccggcaccctgttcatgctggaagtccacggtgattccatggtggatgccgctatctgcgatggcgactatgtggtggtgcgcgaacagaattccgccgtcaacggagatatcgtcgccgctctgttggatgacgaggccacggtgaagaccttccgcaaggaaaacggccatgtctggctgatgccgcacaaccccgcatactcgcccatcgacggcacacatgccacgattatgggcaaggtggtcaccgtactgcgcaaattatagcctgttcgccaccagctgatcagcgtgcgctgaatcgcgctggtcgtgctatagtcgcacactgcttacgaaaccccggcctcgcgccggggtttcgtcgtattcagaccatatcgcaaatggtattgagaagcggtttcaactcgatagagcgaaggagtacacatggcccatacccatacacccgcaccatccacatccgtaaaccctgccgcgcaccagcgcaggctgattgccacgttgaccgtcactggttcggtcttcctcatcgaagtggtgtcggccgtcttaaccggctcactggccctgctggtggatgccggtcatatgctcaccgacatgtccgtgctggtggcatccacaatcaccgccatactgatgcgccgcaagcccaacaacactcgtacttggggctgggccaggcttgaggtgctcaccgctgccgcgggcgccgtagtattgcttatcgtcggcatctatgcgttggtagaggccggcatgcgtctgttcggcggctccaaagcggaaatcgacgatatcggcttgctgctgttcgtaggcattctgggtcttgtcgcaaatatcatctcgatcttcatccttgcctcgcagcgcgaagacaacatgaacatgaaggccgcgttcctcgaggtaatgaacgacgcacttggctcggtgtctgtggtggcctctgccctggtaatgatctccaccggatggaatggcttcgacgccgtggccggtgccgtcatcgcactgatgatgattccgcgcgccatcaagctgctgcacaacgcggtcaaggtgctgctggaggaaacaccggatggtcttgatctcgataaggtacgcgagcatctggaagacgtgccgcatgtgcttgccgtgcatgacctccatgccagcacggtgtccaccgacatgccgattcttatggcccacgtggtagtcgacaaagacctcaccatggaagatgccgccacaatcctcacccaactgcaggattgcctgcgcgagcacttcccggtctcggtcccccacaccaccttccagcttgagcccgagggctatagctccccctcctccaacgaattccacgaataaaaaatgcttcctctggaagcattcagcagggtataaaaaatcgctgtacgtgtgcgatttttcgtgccgcacaaggtgaaggcctacaaaggtagttcgaaccttgtgcggtgtgaaaggcgctccgtacagcgattttttatcagaagccgaactgggcggcggtttccttcagcgtctcggcggagcgcttcagagcggcgagctccttgtcggagaccggggtgttgatggtgttgttgacgccctgacggttgaggagggtcggcacggacatgcagatgtcggagatgccgtggaagtccttgagcatggagctcacgggcaggatgcggttggtgtcgtgcaggacggcttcgatgatgtcgacgccggacatgccgatggcgtagttggtggcacccttaccgttgatgatcttgtaagcggcgttcttgacttcctggtggatctcctcgcgcttggcggcgtcgagcggatcgtggccgggcagcggggtccagtcgcacatggggacaccaccgatggtggcggactcccacagcgggacttcggagtcgccgtgctcgccggcgatgtaggcgtgcacgttcttgacgttgacgccggtctgctgggcaatcaggaagcgcagacgagcggagtccaggttggtgccggaaccgaagacctggttctcgggcagaccggtgagcttctgagccacgtgggtagcgatgtcgaccgggttggtgatgagcatgtagatggcgttcggagccaccttgaccaagttcggcatgatggccttgaggatgttgacggtagcgccaacgagctcaagacgagactgacccggcttctgacgcggaccagcggtgatgacgaccatgtcggcgtcgcggcagatctcaggatcgtcggaaccgtcgatggacacggtcgggtagaagctggagccgtgctgcatgtcgagcacttcggcttccacgcgctccttggcgatgtcttcaagcacgatctcgcgagcgacgccacgctgggcagcggcgaaggcgagggtggagccaacggcaccggcaccaataacagcaagcttcgtgggcttaacggtagtttccgccatgatggatgaacctctcttcaaaggcggtctgctgatgaatggcaggccttgtaactaacggttttcactctataaacccgctaagacgttttgctaccagcacaccaccctgtctgataacggtatggtaatgtttccaacggttgttagcgctcacaaacaaactgtgatgtttatcacgttagtcaatggactgttcgaccacctgagcggcaagatgggcgtcgacgtccgcttcaagctgtatgccatcatcgcggtactccaccttgtccaccttgccgtattcgcgtacacgagagatcagggagccagcggtatacggcagcagagcgttgacatgcacatgcgggaccggcagcagactttcgaccgcggtacgcagctcgtccaatccctcaccggtataggcggagacgatgaacgcatccggctgcagtgcggcgagtcgttcacgtgtcgcctcgtccgcctgatcggccttgttgaatacgagaatacgcggaatcgaggccgtgccttcgatgtccgccaacacgtcattgaccgcgtcgacctgagagaacgggtcagggtgggagccatcgaccacgtgcaggatcacgtcggcctcggccacctcttccagggtggatttgaacgcctcgatcagctgggtgggcaggcggcgcacgaagccgaccgtgtccacgtaggcgtaagcgcgtccgtcgcgggttttggcgcggcgcacggccgtgtccaatgtggcgaacagcgcgttttccaccagttcggccgaaccggtcagacggttggtcaacgaggatttgccggcgttcgtgtagccgaccacggccactgtgggcaggccgaagcgacggcgtgaaccgcgcttgacctcacgtgccggggccatctcacgaatctgacggcgcagtctggcgatacgcgtgcgaattacacgacggtccatttcgattttggtctcgcccgggcctcgcgatccgatgcccgcatccgcgcctgccgcgcgaccgccggcctgacgggacagcgaaccaccccaaccacgcagtcggggcagcatgtattcgagctgcgccaactccacctgcgccttaccttcacgcgaggtggcgtgctgggcgaagatgtccagaatcaccgcggtgcgatccaccaccttgactttggctgcgtcctccaatgcacggcgctgtgacggcggcaggtcgtcgtccacgataatcgtatcggcttcctcacgcgccacgatgtcggcaatctccttggctttgccggaaccaacgtacgtggctgcatccggcttggagcgatgctgcagcaaaccatcgcataccaccgcaccggcggtttcggcgagcgccgccaactccctcaacgattcctcggccttggcttgcgtggtgacggcggacgaccagacgccgacgagcaccacacgttccagacgcaccttgcggtattcgacttcggtgacgtcctgcagctcgccgagaccggcgacatgcttgagctcgttgcgggcctcgcgctcctcccattcctggttggcgtcctcgtgccagccggtcgcgcgctggctgtcgtcgagcagcacttcggactgcccggccagcacaccttcaggggtaacgtcgttgttgccgcggtcgatgtcggtgtactgggtgttgtcggtcaagtgcgcctcgtttggttggaatggttcacgattcttctatggtcctttattatcatcacatgaggtgacatgctggcatagatcggcacgtaccggcataggccggctgatacaggtcggcatacgagagcggcgaatcccgcagaaatggagcgaccatggcagaacagtatttctctgcggaacccgcgtcgaaggacgtgcgccgcacattgaacgtaacgttgcgcggccatgaggcgaccgctcaggtgtcgaacggcgtgttctccggctcgcgcgtggacctcggtacatcggtattgctgaagcatgcgcccgagccgccgcttaccggcgatttcctggatttgggctgcggctggggccctatcgccctgacattggcgtttgagtcgcccgaagcgaacgtgtgggcggtggatgtcaacgagcgcgcgctggacctgacccatgccaacgcacaggcgaacggccgcacgaacattcatgcggctcaggtggacgagtccagcactcccctgcccgccgagaaccagccggcgttctgcgagacggtgccgggcgacctcacgtttgatgcgatttggtcgaatccaccgattcgaatcggcaaggaagcgctgcatacattgcttatggcttggctgccgaagctcaaggtgggcggcgccgcctatctcgtagtgcagaagaatctcggctccgattcgctgatcccctggctggacgatgcgctcggcgaggggttcactgcgagcaaatacgcgagctccaagggcttccgtatcattgaagttcgtcatgaaatatgagtatcctgcagaacttcccgtatctgccgcgcgtgatgagatagccagcgcggtcaaacgttcccaagtcgttattgtgtccggccagaccggttcgggcaaaaccacacagctgccgaagatcctgcttgagcttggccgtggcacgcacggcaagcagatcgtgcacacccagcctcgccgtatcgccgcgcgcacggtggccgaacgtatcgcctcggagatgggcgtgaagctcggtgacgaggtcggctatcaggtgcgtttcaccgacgaaagctcgcccagcacgcgattgagagtcgtgaccgacggtattctgctcgcccagatccagcgcgatccgaaactcacccaatacgatacgatcatcatcgacgaggcgcatgagcgtagtcttaacatcgactttctgctcggctatctgacggcactgctgcctcagcgccgcgatctgaagctcatcatcacctccgcgaccatcgattcggtcaagttccaggagcatttcgagcacgccttgcatgagaaggtgccggtaatcgaggtttccggccgcaccttccccgtgcaggtggtctatgagccgcttggcaccgcgcccgcgttgatgcgcgaagtgccgggattcgcggtgggcgcccgccccggcgacgccgattacgacgagctggccagcgccatcgcggaatccgattccgaccggccccacggccggtccggcgactcctatgccgatgacggcatcaccgatatgcccacggccgtggctcgagcctgcgccgaactggtgatccactcctcccatgagcgcggtccccgcgatattctggtcttcgcttccggcgagcgcgacatccacgagttcgaggccgcactgcggcatcattacggtccgcgcgccgacgacatgcgccgaccggacgccatcgagatcatgccgctgttcgcgcgattgtccgccgccgaccagcacaaggtgttcgaatcgcatttgcatcagcgcatcgtcatcgccaccaatgtggctgagacctcgctgaccgtgcccggtatccgctacgtggtggaccccggttccgcccgtatctcccggtattcgaagaccgcaaaggtccagcgtctgccgatcgagccgatcagccaggccagtgccgaccagaggtccggccgatgcggccgcgtggccgacggcatcgcgatccgcctgtattcgcgtgaggattacgagacccgaccgcgcttcaccgagccggaaatcctgcgtacctcgctgggtgccgtggtgcttcacatgctgtcggtgggcgtggcccgcacggccgaggacgtcacgaacttcgggttcatcgatccgccggatatgaaggccgtgtcggacggtttcaatgagctcaccgagctcaaggccatcggccgaaagcgcggcgaggtgacgctcacccataccggccgtcagctggcgcgcatccccatcgacgtgcgtctgggacgtatggttatcgaggccgcgaaaaccggttcgccgaatcttctggcccaggtgctcgtggtcgtggcgttcttgagcttgcaggacccacgtgaacgcccggacgacaagcgtgaggatgccgaccgtatccacaaccgatatgcggatgagacttccgatttcctgacggccctgaacatctgggatcgcgtgttccaagcggacggcgacccgagcaacaacgcgctgcgccgtatctgcaaaaccgagtatctcagctggctgaggatacgccagtggaaagatctcgtctcccagctacgccagatgtgcaaggagctgaagttcaaggtcggcgacccgttgcccgcctcccgcccaggcttggagattcgccagctgccgttgaatcagcaggccgcgcattcgctgtgctgctcgtgggatgcggatggcatccacaagtcgatgctcgccggattgctgtcgatgatgggcatgcaggtggtgcgtgagcccaaggcctccgatttcgcggggctgaccggtgcggcgcgcgcccgtgcgatgaaacgcgcccagaagcagtcgaagaacgattatcagggcgcgcgcggcacccgtttcgccctgttccccgcctccgccgtggccaagaagaccccgtcatgggtgatgagcaccgaactggtggagacctctcgcctgtgggcccgctattcggcggccatcgacccggcgtgggccgaaccgttggccggccaattgacccgcaccacgtatgcggagccgcactggtcgggttcgcgtggctcggctgtggccaccgcgcgcgtgctgctgtatggtctgccgatcgtacaggaccgtgccgtgcagtggggacgcatcaatccgcttgaggcgcgcgacttcctgattcgccagggtctggtcgagggcgatattcagcagcgcttcagttacgacgactttgtgggcaaaaaccgtgacattctcgaggatgccgccgatgacgcgagccgcacccgccagctggcggacaccgtgtccgacgaggatctgttcgacttctacaacgcggtcattcccaacgatgtgaccagcgtggccgatctggcgaaatggtggaagtccgagcatgaccgtcagccgaatctgcttgatttcgacccggccaaggtggagcgtctggcatccagcgattcggtgagtctggacgattaccccgaccattggcatacgaccggatcggacggccaacccatcgacctgcgtttgagctacgtatacgatccggccgacccggccgacggcgtcaccgtgcatgtgccgttgaaggcgctctcgcgtatcacgcccgaccagttcacatggaatgtgccgggcctgttggatgagctgattctgtcgatgatcaaggcgctgcccaagcagctgcgcgtccagttcgtgccggccccggatgccgcgcgtgcgattcgtgactggatcgacgagcattacccggatctgccgggctcgggctcgcagcagaagccgaatctgccgccggtggatgaggatggcacgaccgttggctggcctgatttggcacatgtgttcaccaaggcggccatcgccaccaagggtgcgcagattcatcccgaagtgttggggccggaactggtcgagcgtctttccccgtatctcagggtcacgttctcggtggagcagcaactgccggccggcaagcaccctcgtggacgccggcatgcgcgcggccccgtcaaggtgctgggtgtgtccaaggatctgaaggcgctgcaacgcaagttcgccgcgcaggcggaggcgtcggcccgtcaaatggtcaagaagcaggccgatcaggctggagaacagggcaagctggtcagtcaggcgaacctgttgcataaggcgggtgccaccaccgagtcccgggccacgatgctctggcgtggcgcattggatgcgctgcggttgccggccgaacgcatttcgtcgcgctggctgggtaccgaggcgttgatgctggcttctgctccgtacaagttcaccaaggatctggtcgaagacctgcagctggccacggtcaaacggctgatgccgaatgtcgacaggctctcggacgatgaggcgttggccaatgcggtgctcgatgtgcgcgaagtgtacgaggacaccgtctatcaggtggcgcatgacgtgatcgccgtgctcaaggcttatgccgaagtcgacaaggccactggcggcaaggctgatctgccgatgctttcggtgctgcagtcggtgcgcgagcacatcgccacgctggtgttccccggattcgtcggcgccgctcccccggacgcgctggcgaacatctcccgatacctgcaggccgatctcatgcgcctggccaaggcgaagaccgacaagaaccgcgacgtgcgatgggcgtggcaggccgacgaggcccgcacgctggtcgacaaggcgatggccaaggccaaggcggagccggccggcccccgccacgagacgctgatgaagcaggcgaccgccgcccgctggatgctcgaggaattctacgtgtccctgtgggcgcaggaactcggcaccgccaagccggtgagcctgcagcgcatcaagaaggcactggcgtagcgatggcgacgacgcaacggcgcaagccggccaatccgcgcggcagggcgaacgtgattgtcgcggggcggggcgtgtcaggcggcaatcgcaaacgtcgcccgggcaaacgcccgcgcaatcgcaggtatccgctcagcccggcgcgctggtggaagcgggccgggttggcgcagcgcgtcgcggctgtgctggtcaccgtggtggcggccgcatgcgtggtcgcgctggtcgtgggcactgtgcgggtcgtccagtggcgtcgcgacgtgcaggaggccgaggcccgccagctgcagctgacgcagcaatacgacttcaatcccggcgacatcatctcggacggccagttcttcaacgccaatgcgatgagcgaggccgaggtccaggcgttcctcgacaagcagggcgcggcgtgcagcggttcccggtgcctgaaaaccatgaccttcgacaccgaggaccaggcggcgaacgagtattgcgcggcgtacgagggcgcgagaaaggagaccgcggccgcgatcatcgacaagtcggcgcgcgcgtgcggcatcagccagaaggtgctgctcaccgtgctgcagaaggagcagcacctggtcacggccgtcgatccgacggacttccagtacaaggccgccatggggctgagctgcccggacaacgcgaactgcgatccggcctatgccggcttcttcagacaggtgtacggggcggcgcaccgctaccaatactatgtggcgcatgaaagcgcctacggctatcacgccaacgcgctgaactacatccagtaccacccggatgccgggtgcggcggcaccaacgtgtacatcgagaacaaggcgaccgcgctgctctacatctacacgccctaccagccgaacgacgcctcgctggcggccgggttcggcgagggcgactcatgctccagctacggcaaccgcaacttcgccctcatatacaccaactggttcggtgccgcgcgccgataggagcgggacggcaaaaaaccgaaaccacggtaaggctaggtgtcatccgcgccgtcgccgccccgccgcacggccggagaaccggccggatgacgggcggcacggctcacaggtcgatcttcggggaggcgtcgagcagggtacgcgtgtactcggccttgggatggttgagcacgcggccggtctccccgctctccacgacgcgcccgtggcgcagcaccgtgatcacatcggacatctcctgcacgatgcccaggtcatgggtgatgaacaggcatgcgaaaccgtgctcgcgctgcagccggcgcagcaggtcgagcaccttgcgctgcacggtcacgtccagcgacgacgtcggctcgtcggcgatgagcagcgacgggttgagcgccaaggcgcgcgcgatgccgacgcgctggcgctggccgcccgacagctggtgcgggaaccggccggccacatcggcgggcagctccacctgatcaagcaattcaaggacgcgcttgcgccggtccgtctcgctgagcccgccctgcacgagcatcggctcgccgatgctccatgccacggacttgcgcgggttgagcgccgatccgctgtcctggaacacatagcccatatgcttcaggatctcgcgcttgcgcctgccatgcgccttggcgagatcctccccctcgatgagcaccgtgcccgaggttggcgcgagctggccggagatcaccttggcgatcgtggtcttgccggctcccgattcgcccaccagcgcgcgggtcctgccggccaccagatcgaacgagatgtccttgacggcgaagctgccggccttgtacgacacggccacgtcgttcacctgcgtgatgcgcctgccgccgccgggcgcgtcactttccgtgatgcgttcgccgccggccgcatgttcgccgtctgccgcatgctcgtcgatgcgcaggcgcggcacggcgtcgagcagcatccgcgtgtagtcgtcggacgggtggcggaagacctgcgcgacgctcccctgctcgacgatcacgccgttgtgcatcacgtacacgtcctgcgcggcctgccacaccacgcccatgtcgtgggtgatgagcagcacggccagatcgaggtcgaccgccagcgaggagatcagggcgagaatcgccttctgcgtggtcacgtcgagcgcggtggtcggctcgtcggcgatgagtaccttgggtcggttgatgatcgccatggcgatcatcacgcgctgcagctggccgcccgacagctcatgcgggtacgacgaccacacgcgttcggcgtcgtcgagcccgacctcgcgcagctgttcgagcaccttggccttgcgctcggcggcgctgagctgcttctggtggtatttgagcgattccgcgacctgtacgccgagcgtgaacaccggattgaacgcggtggacggttcctggaacaccgtgccgatgtattcgccgcggatgcgttgcagcggcgcgtcggcggccagcagatcgatgccgcggccggcggcgtccttgccgtcgccgcccggaccggagtccggcccgtcatccacaagggcgtcgtcgaggtacgcgtggcccttcacgctggccaccgacggatcgagacggggcagcgccatcgccgtcaccgacttgccggagccggattcgccgaccagagcggtgatgcgccccgggaacagcctgaggctgacgccgtgggtcacctcccgctcgtcgaagctgacggccagaccgtccacggtcacgatcgcgcgtggttcactcattggaagctccttggatgcacaagcgttggaatgcgtccggcgcgcgcgccagcggaccatgccgccggcgcgcgccggatgcggatgccggctcagttcgcgctggcgagcgagacctgcgtgtagtccgggtacgccgggaagttgccgatgacgaagttggtcacgttcgatccgtggatgaacgtgttcttcgaatagatcagcggcacgaccggcgcgtcggccatgatcgtcttgtcggcctcggcccagatcttgccggcctcggtctgatcgatggtctcggtggccttcttgatcagctcgtcgaccttcgggttcgcgtaacgggccaggttgtagttgccgtggccgatctgcgaggagtcgaacagcggggagatgttggcgtagggcgacgggaagtcgggctgccacgagctgatggccagatcgtagtcgcccttgtcgttggtcagcgtatcggaatacacatcgtcgttaagtgtctggatgtccaccttgacgccggcccgcttgaggctcgtctggatcgaggaggcggtttcggcctgagcggaggtggcgatgagcttgagggtcggggcctgctcgcccgactccttgatcagctgcttggccttgtccacgtcgccggtcggatcggccttgtacaggtcgtagtcctcgcggccctcgatgccgggcgtaatgagcgtggtggcgaagttgccggcgatctcgccgccggaagccgtctggtaggccttcttgtcgaccgcgtactgcagcgcttggcgaatcttcgcgttcttcacgtgttgggtgttgatggcgaggtattccagcgcgccgtcgccgctggtggtcagcagcttcttgtagttcgggttggcctgcgcctgcgcgagctgcgcggccggcacgaatccggacaggaacgagttcttgccttcaccggtgccctgcatgatcgactgggcggccaccgaggtgtcctgtcccatcttgaacacgatcttgtcggggcccgcggtgcgcaccggatcggtcttcttgtcccagtaggtgttgcgcacgaagacggcctgcttgccggcctcgttcgactcgaccttgtacgggccggaggccaccggcagcttgccgtagccggacgccgggcccttgccgtcgggcacgggggtgaacgcggcgagcgagacgacccacggccagtcgccgaacggcgcgttgaggtggaagatgatggtcttgtcgttcggcgtctcgatggagctgagctcctggccgtcgaacgggccgtggtagtcctgcgcgccctcgagcagcgtcttgtggtagctcaggccgccggtcagcgagtcggcgaaggaacgctccagcccgtacttgacgtccttggaggtgatgggcgtgccgtcggagaacttgagcccgttcttgagcgtgtacgtccacgtcttgccgtcgtcgctcgacttgccggtgtcggtggccagatcgggcacgaccttcgtctcgcccttgtcggtgatcttccacgcggtcaggcggcggaagatgttgccgttcgtggtggtcggcagaccctggctcttggccgggtccagatccatctccgtgctggacagcagcacgttcagcgtgccgcccttgatggtggtgccgctcgccgagccggtggcggcgttgtcgttggacgcgccgcagccggacagcgccagtaccgcggcacaagcccccgccgcgaatacgcgccatgcgttgttcttcatgatggttttcctctctatcggtgccggtccgtggagcagaccggcaagtatcgcgtgttgcggccgcagccgcactacttcgtgccgagcgcgaccctggggtcgagcaggctgtagcagatgtccacgatcaggttggcgacgatgaccagcacggcggcgaacatcgtcgcgccgaccagcacctgcaggtcgaggttcgacacggaatcgagcagcagcgagccgagcccctgcatcgagaacaccttctcggtgagcaccgcgccgccgagcagcccgcccagatcgaggccgaacatggtcatcacgggcagcagcgcgttgcgcagcgcgtgcttgaagatgatcaccgattcgggcacgcccttggagcgggcggtgcggatgtagtcctggctcagctcgccgatcatctgcgtgcgggtgaccctggtgtagccggcggcgctgagcacggccagcaccagccacggcagcagcagatgcgtgaaccagccgacagggtcgtcgtggaagttcacgtacccgccgctggggaatatctgcagcaccagcgaaaaggcgatcaccgtcagcaggccgatcaggtatgacggtgccgaaacgcccacgatcgacagcccgagcagcgtgcggtcgatcagcgtatcgcgcttgagggccgcccacacgccggtcgccacgccgatgaccagccacagcacggccgcgccgaccgcgatcgacgcggtgatcgggaagcggtcgaggatcagctggctcaccgattcgttgagacggaacgaatacccgaggcatggtgccgagcagaccacggcgccgccgccgctgccgaaggtgcgcccgacgaagatgcccgccacgtaattgcccatctgctcgtaccacggcttatcggtgcccatgaaggcggagacccgctgcagctgctcgggcgtgcacggcttgccgcacgacagctgcgccggattggtcggcagcaggaagaagatcaggaacagcgccagcgtgatgagcaggatgacgacgatcgagctcgccacgcgcttgccgatgtattgcaggattctcatgcacgcacccccttgcgcgggtcgatggcgtcgctcaggccatcgccaagcaggttgaagccgaaggtcagcaggaacagggcggcgcccgggaagatcagatacatcgggtcgaccagggcccactgcacggcgtcggagatggaccggccccatgagggcgtcggcgggttcatgccgacgccgaggaacgacaggcccgcctcggcgccgatgcgcccgggaatcgacagcgtgatgttgacgatgagcagcggcatgaggttcggcaggatctgatgccacagcacatgggcaggcgaggcgcccatcaccttggacgcgacggcgaaattgcgcttgctcagcgtcagcgtctgcccccggacaagacgcgcgatgccgggccatccgaagaatccgagcactagcgtcagcagcaccggcctcgggaagccctgcggcaccaccgccgacagcgcgatcgcgaagatcaggaacgggaagccgaagaagacgtccatcgtgcgcgagatcagcgcatcgaccaacccggggaaatagccggccagcagcccgagcgccacgccgatgaccagcgagatgaccgacgagacgacgccgatgcccagcgagatccgtgagccgtacgccacgatggagaacaggtcgacgccgcgcagcggggtgacgccgaaccagtgccgggcactgatgccgccgccgaatccggccggcaccgacccggcacccaaggcctcgggatgctcggcgtacgggtcgttgccggtgatggccgacaacagcccggccagcggcgccagcagcacgaagaacagcacgatggcgccgccgaccactatcgatgagcgagcgccggaacggagaacgcgccgccgtctttccgccttcggcgcggctttcgccgtcgcatccgtcatattgtcatccccattttcacgctgaacatgccgataatcatcaatccgcgcaggtgggcgcccgtgagccgggtccccctgcagccggtgtcctaacattaaggtttcgcagcaggatgacatgctgtggccttatcggttatttggatagcaggttatcaatggacggcaatcggcggataaggcatgccgcggggacatgcgggaaaaacccttcgttcccgcgcgtcacgccacccgtcattccccgaccgggctgacgtacggacgcagcagggtcgtggtgccggctgccagcagcgcgaaaatcgcgccgaacgggccaagccaggtcaggccaaggaggtcgttgaccaggccgccgaccgcggagccgatggcgatgccgatgttgaacgacatggaattcagggaggcggccagattcaccgaaccgggatgggattggtaggccacatccatatacagcacctgggaagcggaattctgcagatacatgagcatgccaagcgccaccagcagcagtgcgccgccggccggcaccagcgaggcgaaagccagcaggcacaggcagacggcctgcacgcagtagatcggtcgaatgtgggtcagcggctcgacccctctgccccgatcggccagcttgcctccgtacaggttgctccacaggcaggcacagccgtagaccaccaagccgacgctgatatagcgttcgggcacaccgatttcgtcgcgcatgatcggcgagagatacgtgtagaagacgtaggaggcggctgcgccaaagaccacatccgccacgccgagctggatgcggcggtcgaagaacagacggaattgcctcaggaaaccgatcttcgccggatgtgagttgcgtggcagagacactgccatcgatgccatcagcacggcggtgagcaccgaaaccaaggcaaaggtgacacgccagccgaaagtattggccacccaagtgccggccggtacgccgaccacagaggcgatggagaaacccgagaatacccaggcaatgaacttggtgcggtatttgtcggtggtcacgtcgggcgcgaaggtcatggagatggccaccagcgtgccggacaccgaggcgatgagcagtcgggcgatgagcagcaccggatagttcggcgcgaaggcgcacaggatattgccgacgaggaacacgcccatcaacgtcagataggtgagaaagcgcgggaatcgggcggataatgcggatccgagcggcgtgcagggcgcgtacacgaatgcgaagatggccaccagattacccacggtcacttcggagaccttaagtccggatgcgatgtccggcaggatgcccactaccacgaattcgctcatgcccagcatgaagctggcgaagatcaggatggtgaccggcagattgaagaagcggtcggtgcgcgcggtgttcgcaggtgtgttcgtcatgggtgctctcttgagtgctctcgctcgtactacaagctgattcgtcggttacgtcaatcgtttttcgtatcaactcagcgacaacactattcccacctctgcccgctacccaccaccacgacacgctataaaaaccccgccgatgaccaatcatcgacggggttcggcacatgtgcaacgcttgcgattacagcttcggcagatacttcttcagctcgtaaggcgtgacctgctggttgtactcctcccattcctggtgcttgttgtccaggaagtagccgaaggcgtgttcgccgagcacgtcggccacgaagtcggatttctccatgatcttcagcgcctcgtccagcgagcgcggcagcggctgaatgcccatggcctgacgttcgccgtcggtgagctcccacacgtcatcactggtgggttcgcccagctgcatctgcttatcgatgccatcgagaccggcggccagcagcaccgagtaggcaaggtatgggttggccaccgggtcgagcgcacggaactccatgcgcgcggagttgcccttgcccggcttgtactgcgggatgcgcagtagcgcggaacggttgttgtggccccagcaaatgtagctcggagcctcattgccgccccacaggcgcttgtacgagttgacgtactggtcggtgaccgcgcagatttcggccgcatggtacaggatgccggcggcgaactggcgggcggtcaaggacatgttgaactcctgaccggcctcgtagaaggcgttggaatcgccttcgaacaggctcaggtgcgtgtgcatgccggaaccaggcgcgtcggccaggggcttgggcatgaaactggcgtgaatgccacgctccaaggaaatctccttgaccaccgtacggaatgtcatgatgttgtcggccatggtgagcgcgtccgcgtatcgcagatcgatctcgttctggcctggccccgcctcatggtgcgagtattccaccgagatgcccatttgctcgagcatgttcacggtggcgcggcggaagtccatgcctgggctgcgcggcacatggtcgaagtagccgccctcgtcgatcggggtcggggccttggaccagtcgtcctggctttcgaacaggtagaactcgatttccggatgcacgtagaacgtgaagcccttgtccttggccttggcgagcgtacgcttcaacacgtgacgtggatcgccgagcgaaggctcgccgtctggggtcagaatgtcgcagaacatgcgggcggtaccttgcgggccaccgcgccacggcaggatctggaacgtcgcgggatcgggttgaacgatcatgtcgtcttcggacacgcgggtcatgccctcgatggcggaaccgtcgaagccgagaccctcctcaaacgcggcttccagttcggccggagcaatcgccacggacttcagtgttcccaacacgtccgtgaaccacagacgaataaagcgcacgtcgcgttcttcgaccgtgcgcagcgcaaactcctgctgtttatccatagtcgcctatcgttccataaccgtgttacgaggggcgttaacatctcactgtttgtcacctgcgagtcgcgagatttcatcaacatgccccggtccgcatgtcaggcatggttcgggcccatgctggcacggcactatggtagtgactatgagcgaaccggcgattcgatcgcgatcgccaattacatgggtggcaccgacgaattcgatcaggccattgcctcgttcgccgtcagctacgccgaacagaatgatgaagactacaccgtcttcaaaaagctcctcaaatccggcgaccttccttgctgagccgttaagcggacagcccaatgggctgtccgtaggcgaggcctgagtgaagcgatagctgagcaaaggtagcttaacagtctcgctaaggcgagtcctttgcctacttcgcgactgcgagcgcttcctggagcgtgaacgcacgtgcgtataacgacttgccgaggatggcggaatcgacgccgatctcggccagttccttgatggcgcgcaaatcgtccagcttggagataccaccggaggccgtgaccttggcgtcggtgcgttcggcgacttcacgcagcagttggatgttcgggccggacatcatgccgtccttggccacgtcggtgaccacgtaacgcgagcagcccacggagtcaaggaacttcatggtctcaaacaggtcgccgccttcgcgcgtccagccgcgcgccgccagtgtgtgaccgcgcacatccagaccaacagccacacggtcgccgtacttcttgatgaccgaagcggtccaatccgggttctccaaagcggcggtgccgatgttcactcgggcggcaccggcctcaagggccgcgtccaacgaagcgtcatcgcgcacgccgccggacagttcgatgttcacgcggtcgccaagctcatgaacgatctcacgcagctgatcgcgattgttgcccgtaccgaaagcggcatcaagatcgaccaggtgaatccattcggcaccggcctcaacccaggtacgggcggcctcaaacggcgaaccgtaatcggtttcggaaccggattcgccttggcgcaggcgcacggccttgccatcgcgtacatcgacggcgggcagcagagtcaacgacataagaagagcctttcttcagttacttatacataatttgagctctctcgtcagaggggagcttcatgctttttacagcgtggcgatccagttcttgaggagctgggagccagcgtccccggacttttccgggtggaattgcgtggcggacagcgggccgtgttcgtaggcggccacgaaacgcgaccggccgtacgagcaccagctcacgcgttcgggcgcaccgctcagatcaatgtcgaagcgggacgtatccgccggcttcacttccatcgcggcgtaggagtgcacgaagtaaaaccgttcattctccacgtcgttgagcagcaccgaatcgggggcggcctcgatcgtgtcccatcccatgtgaggcaccacgtcggcgtccagcaggttcaccgttccgccgatcagcccgatgcccgcggcatgggccccgtgctccagaccgtgttcgaacatgatctgctcgcccacgcacacgccaagcaccgggcggccggcgcggatgcgatcatagatcacacggtcgccgtcgaccttcttcagtccttctatgcatgcggcgaacgcgcccacgcccggcacgaccagaccgtcggcctccaacgactgccggtagtcggaggtgagggtggtgtcgacgccaagattggcgagcgcacgcaccatggaacgtacattgccgaaaccgtaatcgaaaacaaccgctgtggtcatattctctcctatcccctactggttggttggcgtctattcgatgcgggagccgcgtccgccacgcccacgcttggtatggttggcgagaatctgcatcgcctggtcatggtcgagtccagcggaatccaccacttcgaacccttgggtcttgagttggttcagggttacgatgccgagcatcaggtcctcgacgaagcgcggcgtggaggtgaacagcacgggcggcgcgaaactctgtccggcctctccctgcacgtacatggccacttcgagcttgtcggcacgattgactgcaagaatcacggccatgccggataccacggtggtcaggtccttggctgcggcttccgggccgtcgccgtccagattcttcagcaccgcgacggccccctgattggcaccgacgcatgcggcggagatgtccgacagctggcagaacgcggccaacagttcggcggaggcaagacgggtgacgatcagcgccaccttcgccttgttacccaacagtccagcgagttcgttgtcgaagccgagcgaggggtcgaccacgtcggccatggcctcattcaccgcatcagcgaccgacccggtgacgtcgtcggtcataggctggccggaatcagcggcagccttatcagccgtatcatcattcgcgtcggaatcggacttcgctgaagcagcgtccgccgttttatcggcatcactggtatcaccggcatcgccggatgccgaatcgtccgcgaattctttctcgaatccggcgagcgcggcctcaagctcctcgtcggagaagtgcgattcgtccggatcgaacttgtcgtcggccatcacagggctcccttggtgctgggcacgccgtctacacgcgggtcgatttccacggcgaagcgcagcgcacgggccagcgccttgaattcggcttcggcgatgtgatgcggatcacggccggcgagcacctgcatgtgcaggcagatgccggcgtggaaggcgatggattccatgacgtggcggaccagagagccggtgaagtggccgccgatcatgcagaattcgtagccttcgggctcgccgctgcacacgcagtacgggcggccggaaatgtcgaccacggccttggccagcgcctcgtcgagcggcacggtggcgtcggcgaagcggcggatgcctttcttgtcgccgagagcctgcttcagagcttcgccgaacacgatggccgtatcttccacagtgtggtgcacgtcgatgtcggtgtcgccgtgggcgtggatggtcaggtcgatcagcgaatgcttgccgagcgcggtcatcatatggttgtagaacggcacggatgtatcgatatcggttttgccggtgccgtcgaggttcagttcgaggtcgatgtgtgattcgctggtttcgcggacgatgtgcgcggttcttgccatcatgtctcctgtgtgattcgtcatattggattgcggcgggactcgaatcgcttcgggtctcgccgcaatcggaaagaaacgtcccttatgctgcttccactatacgaagcgcttcaacaagggcgttacggaaggtttccatctcctcgtcggtgcccatgcacacgcgcagccaaccgtccggtccgaccacgcggatgagtacgccgcgcttcaggagctcgtcgaagatggcttcgcgcttgtcgaagtgcccgccgaacagcaggaagttcgagccggattcggccacttcaagcggctggtccttgtaggtctgttccttgagccatgcggcggtggcctcgcgggtttcgcgcagatgctcgacacggctcagctgttcatcggtgtgttcgaaggcggccagtgcggcggcctgggtcacggcggacaggtggtacggcatacgtacgatgcgcacgcagtcgatgatgcccttggatgcggctaggtagccgactcgcgcgccggcgaaggcaaaggccttgctcatggtgcggcttacggccaggttcgggtggtccttgatcaggctcacggcgctcggggtgccgggcttgcggaattccacgtacgcttcatcgatgacgagaatcgggtgcacgccctcacccgcgccggccacttcggcggtttcgcaggcggcgagaatacgctcgatatcctccatcggcaacggggtgccggtcgggttgttcggactggtgagcagcaccatcgagggcttgacctcggcgatggcctcaagcaccttgtcgacgttcaacgtgaagtcggcgttgcggtgggcgagcttccaaccggtgaaggtgtcgcgagcgtactccgggtacatggagtacgtcgggtcggcaccgagtgcggtgcggcccgggccgccgaaagcctggaacagctggagcatgatctcgttggagccgttcgcgccccacagctcgtccacgtccagacgggtaccggattcacgggccaggtaatcggagaatgcctgacgcaattcaatgtgctcacggtccgggtatcggttgagtgtgggggcgatttcacgcacacgcttggcgatggtgtcgcatacggccgggtccggcgcatacgggttctcgttgacgttcaggcacaccggcacgtccagctggggagcgccgtacggctcctcaccgatcaggtcgttgcgcagcggcaggttttcgggaatcgagctcatcgcagaccggctcccttctcctgctcgcgcagggtggccttgtcatacggatccttgacgaagcgggagagcacgcactcgccgtgggcgggcaggtcctcggacaccgcgaaggcgttgatgcgggcggcgagagccttgaggccttcctcgtcgtattcgatgacttcgaccggcttcatgaacgtgtgcacgccgaggcctgcggcgaagcgggcggtgccgccggtgggcagcacgtggttggaaccggacatgtagtcgcccagcggcaccggggagtacgggccgcggaagatggcaccggcgttcttgatgcgcttgacgacagcatcggcatccttggtctgaatctcaaggtgttcggcggcgtaggcgttggccgcgtcgatggactggtcaagaccgtcggtcagcacgatggcagactgggtgccggacagcgacgtgtggacgcgctcggcgtgctcggtacgcggcacgcggtacttgaggttctcctgcaccttgtcggcaatctcggtggagtcggtgaacagcacggaaccggcgagctcatcatgctcggcctggccgatgaggtcggcggccaacaggctcgggttggcggtttcatcggcgatgatgccgatttcagtggggccggcgaccgcgtcgatgcccacgaatgcggagaccagtgacttggcggtggccacgaagatgttgcccgggccggtgatcttgtcaaccggatcgcacaggatgtcgccgtcctgcggctcgctgcccttggcgccgtatgcgaacatggcgatggcctgggcgccgccgaccgcgtatacctcgtcaacaccgaggatggcgcaggtggcgaggatggtcttgttcggcaggccttcctcattgtcgcgggcgggcggggtggcgatggccaacgattcgacgccggcggcctgggccggcacagcgttcatgatgacggagctcgggtagacggccttgccgccgggcacatacaggccgacgcgctgaatcggaatccagcgttcggccacgcgggcgccttcggcgaggtcggtgtagaagtccttcggcacctggttggcggccacggcgcgggcgcggcgcaccgattcctcgatggcggcgcgcacttcggagtcgagcgtggtcagggcgtccttgatcgcctcgaccggcacgcgcaggtttttcgggcgcacgtgatcgaacttctcctcgaagtcgcgcagggccgcggcaccgcgttccttgacatcgtccagaatcggacgcaccagatcggtggcttcggaagtgcccattgcagcacgcggcatcgcggcgagcagttcggcacgagacaggttctgaccacgcaggtcaatgatttgcatgatgttctcactcataacgccccatcgtaccaacgtgcggggcctaagcggcgaggaacgcccatgttcacccgtatcgtgagattatcgtgcgtgatgtggattcgtgatgcaggttattgacgcacgccaaatgcccgagcggtctcatcgataatcggcatgtcatgtacggcgacgtgactcacttcggaccatcgcggaccaatggctaattgctcaaccaaggcttgcactgcgtcgctactgccttgtgcttccagctcaaccgagccatcgcggcaattgcgcacccagccctgtacaccaagtcgacgtgcctgagtcaccgtaaaataacggaatcccacgccttgcaccagtccggtgaccgctatatgtttgcggaccaaattcgctgattgcctcatgatgctcagttcctaatccatcgttcgcagcatcgggtagaggctcaggaatcgccggtatgcgtcggcatatgtgcgtgcggtgtcaggattcggctggtatacagtgcattcgcatactgattgcagcaggtctggtacattgaataccaacgaggccattgccactgctggcagaatatcggcattggcgaacacttcgatgggatgctccaacacatcggccagaatctggcaccacgcattttctctggctccgccgccaatcagggaaatctcgctgggtttggcgtcaaaactttccataccttgacgaatggagaaggccacgccctcaagcgcggcacgcatcatgtctgccttggtggtgtctggatcgaggcctacataggccccgcgaatattcgggttcattacggggaaccgctcccccaccagatatggcaggcacatcacaccgttggagccgggtttggatgtttcgataagctgatgtgcttccgcgtaatcgccatcagcgaatacgccggtaacccatttatgcacgtcaccggcgttgaggaatggcacggcattcacgaagacttcttccacaccaaatgccagattcgcagcaccgggcttgccggtgaacggttcgggcgaaacggtggcgatccaacctgaggtgccgatattgatgttgtattgaccagggcggctgacaccgctggccagcgtggtggcacccgcatcgccaatgcccgcgtataccgcagttccggcggagaaaccggtgcgttgtgcagcggattccgtcactgtgccaatgttgtcttgcggattgtgcaggtgtggcaacatggccatgtcgattcctgcggcctcgcacaattcggcatcccattggccattacggatattcatggcaccggctgtggaacaagccgccacatcgcccacgcattcgccggtcaattgggcgatcaagtagtccttggaactgatcaatacatgacgaatgcgcgcgtacgtttccggctcgtgttcacgcagccacatcaacttgggcaacggcaggcagccttcgagccggttgccaacggtgttcaggaaacgttctactccaccctgatatgtcttggcgagttgcttggcctgttcctcggctcggccatccgaatacagaatggcattgcggacgggattgagctcgccgttcaaagcaataacatcctgcatctgaccgctgaaaatgatgccacgaatgcgagtcacattgaattctgactcggattgccgcgcctgctcaatcatgtgcctggaggccgagcagaaagcttgccaccattgatcggggctctgttcccgatagtcgccgttgataataaggttaagctcactactcgcactggctacgatacggccttgcctatcaaccaaggcacccttcaacgccgtggtccctgcatcgaatgcagccacatattcctctgccacgtgctctccccttcaatctgggttgtgattctactggttattatcgtagccgcttactcgttgcattcattaggtcgatttcacgttcattaggtcggtatgccgtaagacggctcttcaggaatggcgtaatgactgggttctgatgccgaagaccctggacccattgacctaatgaatgcaataatgacctaatgaacgagaatcacgccatcattacgcaattctttgcccgcgaaacgcggctcattgcatcgtcttgtttctaaaataggaaattgaatgaacactacgaatagtgaggcattatggcaattcaatcgacaattatgctgaacaacggcactgtcatcccgcaggtgggcttgggcgtattccagacaccggatggtgatactacagtgaacgcggtgcagacggctctggagaatggctaccgccatatcgataccgcaatgatttaccgcaacgaagcctcagtaggtgaaggtattcgccgtgctggtgtgccgcgcagcgatttcttcttgaccaccaagctgtggaatgacgatattcgcgcac

SEQ ID NO: 4005 - DNA, 4750 bp, Unknown
  R22_24m  MAG No. k141_60780
gatgatgaccacgggaatactgcgcgatttcaacaaagacttcgcttgagtggtcagaccgcccatctgctgcataatcacaccttggggatttctatcgatgatgccgcggaaacagtcttccgtggcatcgccatggttagtctgggtgaccgtgatggcgaggcccgcctgctgcgcccagtatgaggcgtatttgatgagttccatcgtgccgttgtgctcaatgtattcgacgacgagctctatggtgggggagagtttggtgttgaccagaggccttgagtaaccgtgatctttgaggatttgctcgacttgtctccgcgtctcgtcggaaatgcctgacctgccattgatgactttggaaacagtggatgcggatacgccggcgatttttgcgagctcgccgaccttgagcttgtgggtggatgtatcgttaaccatcggtgcttccctcttggatattcgccgttcaattactgagacgatttcgtcgttgttcccaccattatgacgcattgtgccgtaacaattccgtgttttcttgccctttgtccggccttgaataaaaattttcgcaaataggcttgcaaatttctttattcggacgtacgatatagccgttggttcacaccaggcgaaggagcccgaacacatgagtaccatcaccaaagtcaagacgtatgacttccgattccccacttcaacgacgctttccggctcggatgcaatgaaccccgatccggattattcctctgcgtacgtggagatttccaccagcgccgacgacggcatcacgggtgtgggattcgtgttcaccatcggccgtggcaacgacgtggtttgcaaggccatcgaatcgatgtcgcaggtgctgattgggcgcaacaccgaggaactgctcgacaacatgcgcattgcatgggacctgttcgtgcatgattcccagctgcgttggcttggccctgaaaagggcgtggagcatatggccatcggcgcggtgctctccgcgttgtgggatatcaaggccaagcgtgcgggcaagccgttgtggctgctgctgggcgagatggagccggaggagctggtctccacgctcgatttccgctacatgaccgacgccctgcgccctgaggaagccgttgcgattctcaaagagggtcagaagggcaaggccgagcgtatcaagcatctgctggaggtcggttaccccggctattcaaccgcccccggctggcttggctactccgacgagaagatggtggccctcgccaaggaggagacgcaggtcaagggattcaagcagatcaagctcaaggtcggccagaacatcgacgacgatctgcgtcgcctggccaaggcccgtgaggccatcggccccgacgtgcgcctcgccgtggacgccaaccaggtgtgggatgttcccaccgccatcgactggatcaacaagttccacgacttcgatctggcgtgggtcgaggagccgaccagcccggatgacgtgatcggccacgccacgattgcgcgcgccatcaatcccatcaaggtggccaccggcgaacagatgcagagccgcattctgtacaagcagtacctgcaggccaacgccttcggcatcatgcagatcgacgccacccgagtggccggtccgcaggagatcgtgctcgaatacctgctcgcaaagaagttcaacaagcccgtctgcccgcacgccggcggcgtgggtctgtgcgaggccgtatgccacttcgcgatgttcgattatgtggccgtgtccggcacgatggacggccgcatgatcgaatacgtcgataaccagcatgaacatttcgtccacccgaccgagatcaaggacggcaactacgtcgctccgaccgctccgggcaacggtaccgaaatgacgctggagacggccgagaagtacctgtatcgcggctgaccgcaactgaaaattcataactgaacaacacaactcaacacaacaacacacaaccactccggctggggtgccgaagccccggccgggcgtgacatggaacacccatgaaacgcagaataaggatggacgaaggagttcccatggatctgcatctcgaaggcaaagtcatcatcatcaccggcggtttcaaaggcatcggcaaaggcatcacgctgcaactggcccaggagggggccatcccggtggtgattaatcgacccgacagcgctctcgacgagttcaagaaggatatcgagcagtacaccaccacctatgatgtgcacttgcttgacctcaacgacaccgacaagatcgccggcgtcgtcgaagcaacatacaagaagtacggccatatcgatggcattgtgaataacgccggaaagaacgacaacaaggatctcgagaccactacttggcgtgagttcgaggaatcgcttcacggcaacctgactcactattacgagctggtccacgcggccgtgccgtatctcaaggaaagccgcggatccatcgtgaacatctcgtccaagaccgcgcttaccggccaaggcaagaccagcgcctatgcggccgccaagggcgcgatcctgggcctgacccgtgaatgggccgccgcattggtgcacgatagcgtgcgtgtcaacgccatagtcgtctccgagtgctggaccccgctctatgccgattggatcaagacctttggcgatgaagcggcccagcaggcgcgcctgtcggtgatcaccgacaagattccgctggaacatcgtatgaccaccaccgaagagatcggtaatgaagcggcattcctgctctccgaccgctccagccacaccaccggtcagtgggtgtacgtcgatggcggctatgtccaccttgaccgtgcgctgagctgacaagcagccctttcccgaatattcgcgcggcaattccggagctttgatcattgctccatccgtacgccgtatccgcgtatgccgcccgtatcacccgcgccctgggtcatccgtttaccaacatggcccagggtggtccactcctcgctaggcaatatcggggaaactcgtatcactaaggagtcaatgatgacatccaaaaacacaaccggttccaaggcgaccatcgccattgtgctggtgacctcactgttctttatctggggtttgaccatgaacctcgtgaacgcgttgaactcgccgttcgcaaactacatagaactcagcagcgccgaagcgtcattactgcaggtggcctattacggcgcatacttcgtcatggccattccagccggcttgatcgccaagcgtttcggttataagggcggcgtcatctccggtctgttcctgttcgctctgggcgcgttcatggtgatccctgccaccaacatggccagctacggtctgttcctgttcgccatgttcgttatcgcgctcggcgcggcatcgctggagaccaactgcaatccgtatatcaccaagctgggtgatgaaaagggcgaatcgttccgtatcaacatggcgcagagtttcaacggcgtcggcaacatcgttggcccgctgattcttggccagattctcggcaccaccgtcgcatcaggcgagtccggcttcgacgccgctaaggcgcagttcctgaatgatacccgcacgatatacattgtgatcggcgttgtgctggtcgtggtgctcgccgtgttcgcgctgttcaagctgcccacgcctccgggagacgaagaggaggccgcgggcggcgcctcctccgagaacagctccttcttcggcctgctcaagcgcccgcacttcgcattgggcgtgcttgccgagttcattttcatcggcctgcaagtggccggcatggcggtcttctccgcctacgcgctcaagcactggggcgcgggcatcacagccggcaccgcggcgatgatgctttccgtgctttccctgctgttcaccatcggacgcttcgccaccaccccattgatggccaaattcgatccctcgaagattcttggcgtatacatgaccatttcagccgtgctgatgttcgtggtattccttggcctgggcaaggtctccgtcatcgcgttcatggtggcgtatctgttcatttccatcggatacccgaccatattctccctgacgctgaaaggtatcaagggttccgcggcgaagaccggttcctcggctttggtgatgagcattgtgggcgccgcgttgattccgctgctgctcggtgtgattcaggatgcggcaggcatcgagatcgccatcctggtgatggtcccgggcttcctgttcgtggcatggtacgcattctggggttccaagatcggtctgaaggaggcctgatatgacactcaacgtaatcgattcccacttccatatctgggatccggatgcgcaggatctgccatggctggcaggattgccctcgctgcaacacaagtacacgattgaagacctagccgcacagtacgccaaatttggcgtgaatttcctcggcggcgtatacgtggaggtcgacgcggccgaccatgagcttgaggaccggctgctgtacgagaatgcaagtcctctgatcctgaagcgcatgctgcaaggacgggtaagcccttggatgcgtgtcccgattaatgccgatggcatcagggaaccgctgcatgtggattccgagccgcggggccgtgcgctcgaacccgaattcatcgccggtctacgcgcgatggccgccaagggattgccattcgagctgtgcaaccgtggcccggaactgggc

SEQ ID NO: 4006 - DNA, 6784 bp, Unknown
  R22_24m  MAG No. k141_61184
gcctcccgcaatccgctgctcgcaccgttcgcggcgttgatcggcgcgctggtgtggttcaatctcgtcgcccaggtcatcatgctgtgcgccgccctcatcgcggagtgccgacgggaatgctgaacagccgcccagaccacacggtatggtggggcgcatggctgattacgggaacaactttgtgcaactgcataaccacacgcactattcgctgctcgatggtgcgtcgaagatccctgatttggccaagcgtgcggccgaacttggcatgcctgcggtcggcatcaccgaccatggcaacatgcatggcgcctacgagatgtacaccaactgcgtggccaatggcgtcaagcccatcatcggcatcgaagcttatgtgaccccggaaaccgcacgtcaagacaaatcccgcgtgcattggggcactgaagcccagcgccgtgacgacgtctccggtggtggtcttatcacccacttgaccatgtgggctgaaaacgacgaaggcctggtcaacctcatcaaagcttcgtccgtggccaacctcgaaggtcgcgtcatgcgttatccgcgtatggataaggaggtgctcgccacctattccaaaggcgtgatcgcatcctccggctgcccctcgggcatcatccagacccgtctgcgtctcggtcagttcgatgaggccctgcgcgccgctggcgaattccaggacatcttcggcaaagacaacttcttcatcgaactcatggatcacggtctgcccatcgaaactcaggtgaccggtgacctgctgaccatagccaagaaactcaacgcaccactgctggccaccaacgattcccactacgtacacgccgaagatgcccaggcacaggacgccatgctctgcatcaactccggttcccgtcttgacgatccggaccgattcaaattcgacggcaccggctactacatcaaaaccgccgaagagatgcgcgaactgttcaaggaccatccggacgcctgcgacaacaccctcgccatcgccgaacgctgcaacgtgatgttcgacgaccacgaagacggcgcgttcatgccgaaattcccctgccccgaaggctgggatgagacctccctgttccttaaaaaagtcgaggaaggtctggagaagcgttacgacggcaacccgccgctcgacgtattgaagcaggccgactacgaatgtggtgtgatctgccagatgcagttctgcggatacttcctcgtggtcgccgactacattcagtgggccaaggaccacggcattatggtgggtccgggccgtggctcggccgcaggcgccatggtcgcctattccatgggcattaccgagctcgatccgctcaagcatggcctgattttcgagaggttcctgaaccctgagcgagtgagccttcctgatatcgatgtcgacttcgaccctgaaggtcgtgcgcgagtcatcgaatactgcggcgaaaaatacggcaccgataaggtcgcccagtgcgtgatctatggcaccatcaaaaccaagcaggccttgaaggactccgcccgcatcatgggctacgagttctcggtcggtgaaaaagtcaccaaggcgctgcctcccgcggccaccggcggcaaggatatcagcctgcatgacatcttcgacccgacagccaaacgctacgccgaggccagggaattccgagaactctacgattccgacccggacgccaagcgcatcaccgaagaagccaagggtatcgaaggcctgatccgacagaccggtgtacatgcctgcgccaccatcatgggtagcgcgcccatcaccgacacctcgccgttgctggaacgcaccgatggcaccatcaccaccaccttcgaataccacacgtgcgaaacgttggggttggtcaagatggacttccttggcctgtccaacttgacgatcatccacgacaccctgaagaacatcgaggccaacggcaaacccgccatcgactacaccaagattccgctcgatgacgccgaaacctacaaactcatgtcccgaggagacacgctcggcgtgttccagctcgattccgacggcatgcgttcactgctgaaaaccctgaagcccgataacttcaacgatatttccgcacttatcgctctgtaccgaccgggcccgatgagtatggattcgcacaccaactacgccaagcgcaagaatggcctgcagaagatcacgccaatccaccctgagcttgaggaacctctgaagcaggtgcttgacgagacctatggtctgatcatctaccaggagcaggtgcagtccgccgcccgaatcctcgccggctattcgctgggcaaggcagacgtgctgcgtcgagccatgggtaagaagaagcccgaagtgctggccaaggagaaggtgccgttcttcgccggtatgaaggagcatggatactccgaagaggcctcccaggccgtgtgggatattctggtgccgttctccggctacgctttcaacaaagcgcactccgccgcatacggtctgatctcctactggaccgcatatctgaagacgcactacccggtcgaattcatggccgccctgttgcaaggtgccgccaccaacaaagacaagaccgcactgtacttgggcgaggcccgccgcatgggcatccaggtgctctcgccggacgtcaacgaatcggtgtacgagtactcggcagtcggcgacgtcgtccgattcggtcttggtgccatccgtaacgtgggtgacaaggccgtggccgatatcatcgccgaacgcgaaggcccgcgcggcaagttcgtgaacttcatggacttcatccgccgcgtgcccctgaccgcgctgaaccggcgattggtcgaatcgttgatcaaggccggtgccttcgactcgattgacccgaaccgtcgcgcgctgttcaccgtgcacgaggccgccatcgactcggtggtgagtctgaagcgcaaacaggcggagggccagttcgatttgttctccgatgccgaggatgggggagcggaggccatgggcgacgcttccgtgaccgtacccgatcttgaggaatgggacaagaagaccaagcttaacttcgaacgcgaaatgttgggcctgtatgtgtctgaccatccgctctccggtatgcagtcgattctcgcgtccttgcgtgaaatgtccatcgcgcatctggttgatcgagccaaaacgatgggtgaaggacagcaggtcacgttggctggtttggtcaccaatgtggaccggcgcgtatccaagaagggcaacccctgggccatcgtgaccatcgaagacatggaaagctccgtccaatgcatgttcttcggcaaggtctatgaagcggccgccgccgaactcgccgtggacgccatcgtacagattcgtggccaagtggagttgcgcgacgaaaccgtttctctgagagccacggaaatgcagattccgaccttggaagccgaggatgaacgtccgttggtcatcacgctgccgccggtggcgttggagcgccaacgcatgatgcaactcggtcaggtgctcgctaatcatcctggttactgcgaagtacatcttgcggtgctggatgagaagggtaacgctcaggtgctcacgtttggcgatcgtttccgcgtcaagcgggatacttcgttgtttgctgagatcaagattctgtttggccccagctgcttgcctgccgcctgattggcgggtttcgcccctggcctctccctcatctggctttgctggggactccttcatcagagggagctaaggcatgtgccaccgtacgatgtgcgcgactattgtggaacgtatgggcatggagatggcggatactggtaacaacgatgacgagcaacaatggattgccacgatgctggaacggctgtctcattcgcagttccgcgccaaattcgctttgaccgacaaagaacgagcctatgcccgcaccaaaggcaaggcgaccatcgatcgtcatgcgcgagaaatgttgcgagaccgcataggcgcagccgaaccgaagaacgacggcaggcagacgccatggcgcggccatccggtattcaccgctcagcatgctaccgccacatgctgccgcggatgcatcgaaaaatggcatcatctgcccaaaggccgtgaactcaccgaagcggaggtaaaccgacttgccgatttggtcatggcatggattgagcgggaccttatcaatcatccggttcggtgaagcacccagcatcctcagtatgcctgtatgccttcaatagttatgagccaacagccaacacaggcctcgaaaaccgtagacgcaaggtattggcgaatacggcagaacgccgaacgttgcctatggcgtgttcggcaataatgtgacatgatgtctattcaagaagagttgacgaagcgtcaactctaccccaaggaggcggaatatgtactacagcagcggcaattatgaggctttcgcacgtccgaagaagccggccgacgtggacaacaagcatgcatacatcatcggtaccggactggcggcattgtctgcagcctgttatctggtgcgtgatggtcagatgcctggcgagaacatccacatccttgagaaggacccggtacccggcggcgcctgtgacggtcttgatattcccggcctcggctatgtgatgcgtggcggccgcgagatggacaatcatttcgaggtcatgtgggatctgttccgctcgattccctccatcgaaaccgaaggcgtcagcgtactcgacgagtactactggctcaacaaggaggacccgaactactcgctgtgccgcgccaccaaggacctcggcaaggacgcggggctcaagggcaagttcggcctgtccgacaaggcttcgatggaaatcatgaagctgttcttcaccccggacgaagacctgtatgacaagccgatcaccgatttcttcgatgatgaggtgctgaactccaacttctggctgtactggcgcaccatgttcgccttcgagaactggcactccgcgctggaaatgaagctgtacatcaaacgctacattcatcacatcggcggactgccggacttttccgcgctgcgtttcacccgctacaaccagtacgagtcgatgattctgccgatggtcaagtatctggaatcgcatggcgtcgaattccgctacaacaccaaggttgagaacgtggaattcgcgattggcgggggagccggccccaagcgcgagcacaccggcgtaggccaggacaccatccaaaagattcaggccacctccggtttcttcaagcgcaaccctgccagcacgcccaccaagaagcttgccgtgcgcatcgacgtggatcacgagggtgataaatcctccattgacctgaccgagaacgatctggtgttcatcaccaacggcggttgcgtggagaactccaccatgggttcccagaactcgcccgccgcatggaacccagacctgaagcccggcggcggctgggatatgtggaagcgtatcgccgaccaggacccgagctttggccatccggagaagttctgctccgatccgaatgccaccaagtggatgagcgccaccatcaccaccctggacggcgagattccgccgtacatccagaagatttgcaagcgcgacccgttctccggcaaggtcgtcaccggcggcatcgtcactgtgcaggactccaactggctcatgagttggaccctgaaccgccagcagcagttccgcgaccagcccaaggaccagctgtgcgtatgggtctacggcctgttcccggacaagcccggcaactatgtgaagaagccgatgaccgaatgcaccggtgaagagatttgcgaggagtggctttaccacatgggcgtgccgaccgacaagatcgaggcgctcgccaagcatcacgccaacaccgtgccggtcatgatgccgtacatcaccgcgttcttcatgccgcgcgcggccggcgaccgcccggacgtggtgcccgatggtgccgtgaacttcgcattccttggccagttcgccgagaccccgcgtgacacgatcttcaccaccgagtactcgatgcgcaccggtatggaagctgtctacacgttgctcggcgtggaccgcggcgtgcctgaagtgtggggcagtgtctatgacgtgcgcaacctgctcaacgccaccgtcaaattgcgtgacggtgcaccggtcaccgatatgaagctcaacttcattgaaaaggccgtggtcaagaaggtgctcaagaaactcgacggcaccgatattgccaccctgctacgcgaataccacgtaatctgacatccatccggctcccctcaaggtgaggggagccagcacgcgaagcgtgactgggggagttgctcacaacggagtgttaagagaaagacaaaaacatgactgattctgatccccagttaatccgccacgccaccatcgacgatctggacgcgctggccgccatggaattcgaatgcttcccggctgccgaggccgccgaccgctcgtccctgcgcgcccgaatcgagacctatccggaatgtttctggctattgattgatggcgagatcgtcatggcgttcatcaacggttttgtgaccgatcggcgcgacttgaccgatgacatgtacgaggatgccgcgcagcacaaccctcaaggtgactggcaaatgattttcggcgtggatactgcgccgaagtatcagcatcgcggttgcgccagtacactcatgaggaaagtcattgaagacactcgtgcagc

SEQ ID NO: 4007 - DNA, 4917 bp, Unknown
  R22_24m  MAG No. k141_61566
aaggtcctttttattggcgaactcgaccggtttggtctatcgcaacagtcgttcgttgaggatgacaggagcgtgttcgattgacggctgcaacgcatcgagctggtcggacagcttcgactcgtcgaccaccggcagttcgagcagggatcgtgcggccgcgtgcaggtagtcgttcaacgcctcgatgcggcccggctccagcgggtaagccgggtcgttctccaaggtgacgtccaacgttttgcgcaacatctcatgctgcgcgctgcccatgatggccgcgcactggtcgcggaacgtcatacgagaatttgccggctgacgttcggacagtacctgcggaatccacgcgccgccctcccagtcggcgcgcatgtcgttcttgaacagcgacatgttatggtcgaacaacggcgccggacccagaatccggccggtacggttgtcgcgcaggaacccgtggttgttggcgtgacggtcctgattgacgatgagcgcgtcgaacactagcatcgtgcgcatcgcctcgaacgattcctcggacacggcgcgtgcggcggcgaggatctccgggaacgacgccagctgcgtcgccgcatagaacggcacgaacgacacgtccttcgagttcatcgaaccgcacaccgacgcgagcttgcccttccaacgggcgatgcggtagtcgaccgcgttcacaccgagcctgcgcgccagctgcgaggcgagatactcggaatacggttccaaaccggcgttcgcatacccttcggaacccgccttccacagttccagcccacgttccgtatgccgccacgccttcgggaactggccgtccgtcgtccactcgctcgacaggccgatcgcatgcttctcgctcgacgtataccccgtgtaggccacgatggcgagcgtctcgtccaacggattgtcatacaggttgatgtccgcgaacttgaggttctcaccgtcgcgttccgcccagaacgaatcgttgaccgacagtcccttgcacaggtcgatgatgcccagcgtatccgcaatgctcaaccccgcctgcgcaagaacctgcgtggcgaactcacgattcttcggaatcgtgcgccgctccagccacgtcgtcagcttcgcattatccggctccggagccaacggaaacggcagcaacgcgcgcttcgactcatcgaaccagcggacatgcgcctcgatcttgcccgccagcaggccctcgccatacgacgcatcgaaccggagcagcggatcatcatagagccgcagcacgtaactcgtcatatccggcccctccaatcacaagcccgctccaaagtcatatcgggcgattcacatatgaagaacaactgtctacagtatagacaagggccttggaacgcgggggcttcactctgaagtcaagtatttgatacaatttggtgcaaaaagatagtaaatagcaataaggagtggctatgagcatgcagattgccacgcgagttagtgacgagcaggctgcgttgtttaaggagacgacccgacagctgggcaccaccccggccgatgccctgcgtatgttcatcagcgcgttcaatgattaccgtgggttcccctatgaggtgcgtttgccacgaaatgacgtggagccgtttgcgtccgagcgggacgctactgagtatgccagtcgtctcgccttgaggatgtccgatgaaacgaggtgagatttggacgttgcaggccgatggctacgccagcaagccacggccggttgtcatcgtgcagagcgatgccgtcgatcggttcgattccgtcatcacttgtctgctgacctcatacgattcctccgacatcgacacgcgggtccgattggaaccaagtccggagaacggcctgaacaaagtgagttacgtgatgacggacaagatcgtcaccgtcgaccgcaaactgctgggataccaagtcggcgtggttgatgatgcagccatggcgaatatcggccgtcagctcatgcgggttctaggtttgctgtgacgtttgggatggctggcgggcgtgcgtctacttgtgacatcgtttatgcacccttgaggccgtatgatgatggcgtcgaattcaagctctccccaacgtctaagaaatggcttccttcatattacggtcatacgaccaacaccatatgaaggaagccatcatgaatggtctaacggcaatcagcttctcatacgtgattgccagtcattcaccgaatcagccgcggttgtcgaacatctgcagcagcatcttgctgggttcgacggcatagacggtgtgcggcagacgggcgctcaggtagacgatgccgccggccgtaagctcgacttcacggccttcgccgccgacgcgcagcttgccttccagcacctggatgatcacgggcatggccgcggtgtgctcgctcagtgcctggtccttgtcgaagccgaacagcacggcgcgcaggccgtcctcgcgcagcaccgtacgggagacagtggcctcctcctgaatatcgatcaacgaggccaagtcttcgatgaatccaagatgcggctcggtcgaaatggcgtggccttcggcgtcgtgggcgtcgtgcttgcaggcgcagtgcttggcctcacccgcttcagcggccgcgacttcgccatgcttgcagtggcactccttcttcgcgcccggctccgcggccgcgccctcggcgtgctcgtgcttgcaggcgcagtggtgttcgccgttggcggcagccgcctcggctgccgcggcggcttccctacgctgcttgcacttgcaatgctgctcgtcgcgccctgccttgcatacggtctgctgctcgttctcatcggccatgatgttctcctattcgtcgcgcgtacctcacatacgcgtcatcgcttttacttgtttcccattatccggccatcgttgggccggcacaccgctgttacgcttcgggcttgcgcacctcatccttgacggattcgtccaggttgtccggctacaggccgagttcgtgaatcgagtaggtgccgccggcgcgcagcagtcggaaggcctcgccgataatcgcctgcttgccacgctcggtctgcatggtaagcatggcttcgccgatcaccacgtcggcgctgttggattccagaccggtgtcggcggcgtcgcgctgcacgcagcttgccggaatcgtggccttctcactggtgagtttggagatgatgtccacgatctgctggtcgcggtccacgccacggtagctcttggggtctcggtcggactgcggcaggggcagctcgcggttggtggcgggtttggtggcagtggactgaaatgcctgagaaggctgcggtgtagtggtcatgtgtcgtgatgctatagtccacagcccgcccgcacaagggttttcgctagaaatcagccgaatgtgagaatgctcacccgagtaggcgcctgagcatgcggctcagggacgattcaggggatgctcaggggtcccgtcaccgattccccacatatcgcccgcgttcgcctaatagaatggaatccagcattcgattcggtatccggcgcaatgccggcaaatgtgaggaacttacgatgagggtcatcggcaatattctgtggatcattctgggcggactggcaatcgccatcagctgggcactgatcggactgtttctatgcatcaccattatcggtattccactaggagttcaggcgttcaaaatggcgggccttaccttgacaccgttcggcaaaaccgtgcaatacggtggcggcgttggctccacgctggccaatatcctctgggtggtgctggtcggctggtggatggcactcggctatctgggtgcaggcgtgctcaactgcatcaccatcatcggcatcccgttcggcatccagtcgttcaaaatggccaagcttgcgctctggccgttcggcgcacagatctacagtctgtaacaattgtttctgcagtaggtccggtgcagcgcattatcatcgtgcgttgcaccggactttttatatacaacgggcatttcacacaccgcgtgatttgacggatttggacgtaagaccttatggtgcgcgaaccatgctcaacacatcgcattcagcagcaacggcgtgaacgaacacgccatctgatcagtacacctctcattggcgcatagctgaatcattgccggtgatatcgagccgactcgttcgcaccatgccccataaacgtacctatatgagtatgcgttcttggcatagtcgcaacgcaatgcaccgcggcaaaacccattgcataccatcacatattcagaaagaacaacagatcatgaagtatttcactactgacacgcatttcgggcactaccatatgtcactcacatgcagtcatgcgcacaactatatttttgtatcatccatgattttatagttgtttattgactcatttccttctctatcttatactttctataatcaaggatgctctttgggaagtgagtctctctcatggatatgaagtatagaagtttggcaaggctgttccatgccgacaggtcagtcgattccttcaataaccatgcggcactcgcacggcagcggcttgaggcagattccacattcaggaccggggtcatcacgccattgggcgagctgttctccgccacgccacgcgagacgaccctgctcacggaaaatatacttctcgccgaaaggcgcatatcacggctatggaacctgattcccggcgtcatgcgctgggactacatacggcattccatcagtgaggaactgttcgccaccaacgagatggaaggcgtgcgcagcacccgcaaggaaacccaggacgccgtggacgcggccgacaaggcaaggagggacggcgacgactccaaggcgcggttcagcgaatttgccaag

SEQ ID NO: 4008 - DNA, 3269 bp, Unknown
  R22_24m  MAG No. k141_61941
cgtcagcgcagagccaggttggccgcgccgatcagaccggcatcctggcccgcagtggccgcgacgatcttggcatggccgcggtaggcgctgccttccaggaaacgctggtagttgtagcgggccggctccagcaggatgtcgcccacggccaccacgccgccgccgatcacgaacaggtccgggtcaagcacggcggaaacggcggccatggtgcggcccagccattcgccgatcttgccgaacgcatacaggccaagtacgtcaccttcctgagccgcttgggacaccatcggcccctccagtttggtgatgtcgccgccgcacagttccagaagacgcttggcgtcctgaggacgacggcgcacggcggacttggcgaagttctccagcgaggttcccgaagtgtaacgttcggcgcagccgcgcaggccgcagccgcagtggtcgccgtccgggaccatcggcaggtggccgagctcggcggccatgccgaaggagccgcggtagagctggccgttgatcacgatggcaccgccgaggccggtgcccacggtcagcgcgaccatgttggagctaccctggccggcgccgtgcacgaattcgccccatccggcgcagttggcgtcgttttcgacgatgaccggcacggcatggtcgatcagcgcgccgacgtgctcggacagatcgtagttgatccatgccggaatgttggcggagaaggtgagcgtcttgcgatccgcgctcacattgccggcggcggagatgccgacggcctcgatatcggtgtgcccggcggccacagcctcgcggtacacctcggcgatgtgctggttgatggcgtcggcgtccatcggcgtggggacgcgccagcgctggatgatgctgtcgtttgcatcgcagacggcggcggcgatcttggttcctccgatatcaatggcgagcgtggtcatggcttactccttgaagactttcgtaacatgcgagatagcgaaaatagtagcgagccgccatgacctcccaccgcggtttttccgtggttcgtcatgcgtcgcgaacattccgccgatgcgcttcctcatgcatttcacccgttgcaaacgggcgcccccttaacgccggcatcggtgcggacggcgtgtcgaatcggatgcaatcactttcaccgtccttgcggatggcatcgaagaacggcaggaaacaaaaaaactcccgacatgcatcgggagtttggtggcgaccccggccggacttgaaccggtgacctccgccgtgacagggcggcgctctaaccaactgagctacggggccgtgcgtgcctcgctgaggcacaagaggatatgttacagcatcatcggattacgacacgccgtctgatacatcgttccttccaccggcgaaccgaccgcaggtgtggtggacggtatgcggaccatatcgttcgaccgcgcacgaccgcactccccataagacagtagccgtcatgcgtcaacgcacgttgtgcgacaacgcggcacgacgcacggccaccgaggccagcaaaccgatgaacagcatgatgccggcgaccagaagcgtccactggccgccttcgacgaaccctgaagtcatcgcatcggcaatcttcggcgcctcgtcgccgaattgggccgccggcccatcaccgctgcggaacacgccgatcactccacccgccgaaccactgaccgcttgggccagaccgtcgccgaccttggcgggcagcccgagggattcgagccgcgccggcaatgttccgttgacggccatggccaacgacgcgccggagatggccgaaccgacggcggtgccgagctgccgaaccgtggactgggtggccgacccttcgccggactgcatgatcggcacttcggagagcaccacgctggtcagctgcgcggaggcgaagcccagacccagaccgtacgcggccatgggaacaagctgccaccacaccgacaatcccacaggcataaggaccgcgaccaaggcgacggcgatgatctcgatcacaagaccgagttgaatcacgccggccggggtgagcttggcggccatgacatgggcctgcgcacctgcgacgatggaccccaggcccatcacggccagcatcgcaccggcctgcagcgtgttgagcccgcgggcgttgatgaggtacagcggcagcatgaacaccagcgcgaactcgccggcggcgatggccgcagccgccagattgccccacgagaacgtcttgatgcggaacagggtcatgtccagcatgaccggccgaccggctttgccccgcgcggattcgaagacgatgaagacggccatcagaagcgcgccggcgatcaggcagatcggcaccggcgacaaccagtcacgattccagctcaacccgccgagcttcaactgcgttgaggtctgcttccaccaaccgtaggtctcgccttcgataagaccgaacaccaacagggccgaggtcagggcagacaacaccacgcccgggatatccacaccgacacgatgggatcgggcatcctgcgcggcatccgcggcaccggcgaccgaggcgttcccaccggtctgcggcaccaggaagatggccgacacaaagaccgcgatacccaacggcaagttcaccaggaaaatccaacgccatcccaaggtctcggtgaacacgccaccgagcagcggaccgagggcggcggccgaactcatcaccgcaccccagacgccgaacgccgcggcacggtatttgccacggaacagggcagacaccgtggacagggtgttcggcatgatcatcgcgcctccgatgccctgcagcacacgggcggcaagcagcatccccgcaccctgcgaggcggcggcgagcatcgaactcgccacgaagatcacggtaccgacttgaaacaccagtttgcgccccctggcgtcgcccaacttgccgaaaggcagcaacaacgcggcaagcacgatgttgtagagcgaggtgacccactgggcgtcggtcaggttaatgccgatgtcgtcgatgatggtgggaatggagacgttgacgatcgagctgtcgagcacgatcatggccaatcccagggccatcacccacagcgcgccccacggcggcgcctgggcaggcagtggcgacgaggccgtcggattcgtcgaagagatcgaagacgcatcggcctgagtctgatgctgagatcgggatgcatgatccataacggggtttcctctcattgccatgattgcggcgaccgaca

SEQ ID NO: 4009 - DNA, 3796 bp, Unknown
  R22_24m  MAG No. k141_62988
gccagtttgcaggcacccatcgcctatggcatgggatatacatggttcggtgcgtgggcgcatgaaggtgtgccggagggcgaatcattggacaagcaggcggctgaggccgcccaagccattgatgcatgggttgcggagcatattcccgccactcggccggtggttgccatgggattctcgcagggcggcctcttggccgcgcatctgctgcgtttcaatccgaagcgatatgccgcagccgtctcctgctctggatggctggcaccggggtccgttgcgggcgatgccgaattggcttcgttgaagccgcccgtgttctacgggcatggtgctgcggacgacatcttcccgaaagccgatgtgacggcgatgggtgagttctggcgcgagcacggcacgttgaccgaacaagtgtatccgggcatggcccattcgatcaatatgccggaaatgcgcgatattcaacggttcttggaggccaacggattcattcggccgcagatttggtagtcaccacctcacatgacgtagtctacgtgggcgaattcggggactttgtaccatttgacggggtagccggcaccgtgggcgcagaagaccgagtcgggggtgttgtccagatcggcttcgggatcgtaggcggcggctgcgatgacctgttcggcgtcatggcatggcttgtagccgccgaaggtggcggagaaacggccatggccgtgcgtgtactggttcacgtccatcgcatagtcgcgcatttcggacaccggcgcctcgccttcgatcacggcgtattcgtcatcggtgaccggggattcgaagctgccggccatgcgctggatgtcgctcatagcacggccgatcatgtctgcgggcacttcgagccggaaccggtaccacggttccagcagtcggcagttgccctcccctgtggtgtccggccggctctcgaccggcgtctcgggccggccactgactcctgccctggcttccatcaacccttggcgaatcgcccggtacgtggcttgacggaagtcgccgccttcggtgtgcttcagatgcgcgcggccggccaccaaagtcatcttgatatcggtgagcggtgcgccaacgagcacaccgagatgctcacgctcggtcaggtgggtcagaatcagccgttgccaattgcggtccaaatcattttcggacagggccgaggccacagtgactccgctgcccggctcccctggttccagcaggatatgtgcttcggcataatgacggagcggctcgaaatgacctgcgccttcgatcggcgcagtgatggtctcacggtacaggatggagccggggccaaaggacacatccagaccgaaccggtcgtgcagggtctgctggatgatttccagctggaccgcgcccatcaattgcacatgaatctcggccagccgttccacccacaccacatgcaacaacgggtcttcgtcttccagctcacgcaatgcggtgatgaccttgtgcaaggtcagatcatcgaactggggacgggccggcgagctattgtccgccgcggtctggccggcggtgtcgttctcctcattgcggccggttcccgacttggcggcatcatgctcggcatcgtcctgattcgcgctgtcatggccggctcccccacgtttggccgctcccgaggtgccggccgtatcggattccgctccgacgggcaacaccgtgtaggtcaacacgggttgcaacgacggcgattcggcgtccggttccgttcccagcccttcgccggggaaggtccgcgtcagcccggtcaccgcgcataccaagccggccggcacttcggtgaccgtctcgaatttggcgccattgtagatgcgcacctgatcgactttctcggaccacgccatgtcatcatcctcctgcgctggcgacggtgtcgacgccgcggcgcacgaggatgaggagacgatctccttggctttgagcgcaccgccggtgacgcgcagccacgtcatacggttgtgctgaccgtcgtgggcgattttgaacacgcgtgcggcgaaggcggccggccattcacgttcgcgggtgaacgtctccagcccgtccaggaattccttgaccccttcgagtttcaatgccgagccgaaatatacggggaacagctcgcgtacggcgatcatcgatcgcaatctgcccacggacagcgcgccatgttccaaatagtcgttcatcgcctcctcgtccagggtggcgatgtcttcggcgaacgcgtccaacggtagcgcgctgccctcagtggactgttccattgccggcaacggatatatcgcatcgctcagacgcctgcgcaactgagccaacacggcctcgcgggcaaatccggcggcgtcgcacttgttgacgaagatgaacgtcggcacaccgtatctggccagcagacgccatagtgtctcggtatggccttgcacgccatccgtgccggagaccacaagaatcgcgtagtcaagcacacgcagcacacgttcggtttcggctgcgaagtccacgtgccccggcgtatccagcaaggtcaggcgcaggtcgccgtgttctaccaatgcctggtgcgcgaaaatcgtgatgcctcgcgccttctccaaggaattggtgtccagaaacgcatcgccgtgatccactcgccccaatttgcggatctcaccggtacggtagagcagcgcctcggacagcgtggtcttgcccgcgtccacatgcgccacgatgcctgccactatctgtttcatcagctgtgctcccttcccgatgcgccgcatgttgccggccgcctaaccaatatatccgagaaaatccgggagggaaaaattttaccgtcagaccgggctgccggtacaataagtcaccgaacaccgactgatatgaggagcctccgtgaccacttccggcattaccgttttcggccaaccatcccagcccaatcatggtgccggcgggcgaatcgccatggacgatgccctctttcccaccgattatgtggcgctggatctggagaccaccggcttttacccgaacagttgcgccatcacggaaatcggtgccgtgcgcgtgcgggaggggcatatcgtcgatcaattccagcagctggtgaatcccttgcggccgattccgcgtcagatcaccacgctgaccggcatcaccgatgcgatggtggccgacctcgatccgattgacgaggtgcttccccgattcatcgcatggctcgctaccccggctgccggtcccaccgttgagccgattgtcggtcataacgtcagcttcgatctgcgattcctggattacaacacccggcatatcgccggctgcggctttgcctgcgcggattatgacacgatgcagatcagccgcgccctgttccccgcgcagcggcatcaccgtctggctgacctgatcgtgcgcttcggcatcgcggacaatgaggaacaccgcgcattaagcgatgccatccagacccagcagtgcttcgaatggatgcggcattatgtcaccgagcatcacgaatccgaagcaatccgttggaagcaggcgccggccagaaacagcaccgaaattctccaccagcagctagtggtaaagcggtagttacagcccgtattccttggcgatgacggaccagaggtcggcggcggcctgatcgacggtttcgttgacgatggtgacgtcgaattcgttttcggcggcgagctccactttggcggtttccaggcgacgggcctgctgttcggcggtttcggtgcctcggccgatcaga

SEQ ID NO: 4010 - DNA, 12633 bp, Unknown
  R22_24m  MAG No. k141_64161
gccgcagtaaggagtcatggtgtcctacaccattcgtcaggtggccacgcagttccatatgcagccctctacgccggtgaagactggccggattggcgcgagtgcaaaaaccgcgcctattccattgaatgctgaggccatcgagtgccgagctggatgccggctgggcactaagaccgatgtgcgtcgatcgtgggcgcgtctatccgagtgaggccttgctcggcagtgcgcggtcgagcagccagacaacgagcgatatcacgaagaacgctatggccagcttgccgcagctaatgccgaacccttgccagccgagtgcgtcgaggttgatgaagtcgtacggatacggactgccgccggccgccggtccggaccccggccaaatcgtcgcacgggccagcacgaagaccaagtatgcagggaagtacgccagccacgagaacatgtaatgccagcagaaacgccggtgcgggtcgaatagcacgaaatcgataaccgccataatcggggcgattttgtgcagcatcgtattggtcatgatgccaataacctgtggcacgtatgccgggtcgtccggaggcatcaggaagaacgccaccagtgcggtgactatggcgtacacagtcaggcatcccttaggccatgcaggcggctgaatgcctttgagcagtgtggccgcgccggcccacagcatcacgatgcccagcacgaaaccggtctggaacgtgaaatacacccagaactgcggtttggaccatgcctcatatgtgcccacgaagcagaaaccggcgatcgcaaagcgccacaacgccacgatgaatctcatgcatcgagtctaccgcttcgccagtgggctgtatggctttgcccggactacacttaggtgcaacttcaccacttatgtaggaaaggccttgcaatggtcgattattcgccggctctgatgaccgacatgtatgaatacacgatgctcgacgccgctctgaaagacggtaccgccgaccgcaaatgcgtgttcgaggtgttcacgcgtcgcctgcccgaaggccgtcgctatggcgtggtggccggcaccggccgcattctggatgcgctggaacatttccacttggacgaagcggacctgaagttcctggccgaccgtcacgtggtaagccccgagaccatcaagtggctggagaacttccacttctccggtacgattcgcggttaccgcgaaggtgagatgttcttcccgaactccccgattttgcaggtcgaaggcacgttcggcgaatgcacgctactggagacgttgattctatccgtgctgaactacgattccgcagtggcctccgccgcctcacgtatggcgtcggcagccaaggatcgtccttgcatggatatgggcggacgccgcactaacgagtgggccgccgtggccgccgctcgagccgccgtagtgggcggattcaagggtaccgccaatctgctggccgcccagctgtatggtctgaaggccattggcaccgccgcgcattgcttcacgttggtgcatgattccgagcgtgacgccttcgaatcgcagatcgaggcattgggcaagaacaccacgctgctggtggacacctacaacatcgaggaagccgtgaaaaccgccgtcgaggtggccggtcccgaactgggtggcgtgcgcatcgactccggcgacctagccgccatggcccagcgtgtgcgcaaccagctggacgccctgggcgccacgaacaccaccattaccgtgaccaacgatttggatgagtacgcgctcgccgcattgcagaccgcgccggtcgactcctatggtgtgggcaccatgctggtcaccggctccggcgctcccacttgtgcgatggtgtacaagctcaccgaacgtgaaggcgctgacggcacgatggttccggtcatgaagaaatccaaggacaaggccacagtgcccggtcgcaaactggcattccgctcctacgaatacgcgttagccgaagccgaacacgtgatttccggctcggaggagaagctggccggtttcacgcctgaaccgacgtggaagaacctgctggtcgactttgtggatcatgggcagatcgacgctcagtggcagggccatgacgccatcatggccgcccacgactaccacgccaaggcgttgtccgaactgcccatcaccgcgcagagcctcatgaagggcgagccagtgattcctacggagactcaggttctctgaccgtatctcactggccgcatccctttggttacattggctactcttccctctgtctgtgtccctctgtctgtgcccctctgtctgtgttggccgcactcctgtggtcgccgccgaggcggggagatccaacccccggtcgcacccccgtgtttgcaccccctgtggctgtgtcccggggctgtattggccgcgtcccctcgggctgaactgcgtcccggttcgccggacgtggttccagctgagggtggccccccttgtttttttttggggggggggtactgttcaccggggaaatatgtatatgtgcatgctgttgcaatgtacattttgttgtcagttgacaacgtcttgattcagatgaattggcgggaaatggccatttgtcttatccaattgatttgaagaacgttgtcagttgacaacgttttgtacatggtgcggaacgacacatattcctatcctggtcaggatgccgacgaggtggagtgaaaaaccaaaccatttcagaggatattgcaccgagacgttgtgggattgccgtgttgtcggtgatgttacagagatggcgcagtgttgcgtgaggggtgttgcgtgaggggtgttgcgtgtgatgttgcgtgtgatgttgcgttgggctgattgggaggaatagtgtgccgatagaatgccgtgatgcgtgcagagcaatcgtttgcggagcaatcgttgaagaatcgtgtgaactgatgcgatacgaatcataccgtctctgaattgtgggatatgacgaatcgtatcgtcatgggattgtgggatatgatgattgcggtttgatgaaatgaccgggaaatcggccgaggcaaggtgacttcgatgagtgaaactctcaatgatgagaacgcggcgggcaacgatgacgtatcagagcggcgcgctgtagagcatcgagcgttagaacagtgcgatgtcgtgcatcacggtgtggtatctggttgccctgttaattcgtgtgcggctgtgctgaatgaagtgatgtcgcagactggttggaatgcctatgagcttgcacagcgtactggtttggatcggtctgcaattggtcgcgtattgcgtgggcaaagaggtatgttgtttgatgttttggccgaggggcttgagcgggctggttttggtcttcacctagaagccgtggccccctcgcaaacgattccggaagacgaattgcacatgttgttggcgcaactgcgtaggcctcctgatttcgatgcaatagaaagcggagcgacctggtctacgttgaagatgctctgcgtcaatctgattcatgctcggaatgttcaacatcaacgtatatcgttcgtccgagcggttgcacgggtgaacgatgcgtgctggattgcgtttctcgctggtttataccgttttctgcgttgggatatcaacccaaggaacagacgcttgacattggttcctccgtaccggtatggcttggatggatggtggtccccactgccgagcgcggcaattatgcacgtgcttcatcgatatgaagagccgttgcatgacatggactatacatatttgccgttaatcgattacgaactcaacgctatgcagcgcaagcaattcaaccaagatttcatggaatatggcattcttattccagcggacgatctttcccaatcctcatcaggtacgcaggcattgactctgtaagcgagtggtgcataagaaaatagtggcgtgcagccaagtgtcatggaatggatatgtaagcagggaatgacattgcgctggggtttgatgatggttgacgagttgctatccaggcatagagcggatggcgtatgctggggcgcatggttgaaatcaaagacatgcttggcaatcaccaaataattcgtgccgacggccgcaaggtcgacgagctgcgccccgtgcgcatcacccgccacttcaccgacgcccccgaaggctccgtgctcatcgaatgcggtaacacgcgcgtgatgtgcaccgccacttttacccctggtgtgccgcgttggcgcaaggactccggcctcggctgggtcaccgccgaatactcgatgctgccgcgtgccaccgccgaacgcaccgaccgtgaatccgtacgtggcaaaatcggtggccgtacccacgaaatcagccgactgattggccgctgcctgcgtggcgtcatcgatatgaaggcgctcggcgaaaatcagattcagcttgactgcgatgtgcttcaggccgatggcggcactcgcacggcttccgtaaccggtgcgtacgtggctttggtcgacgcagtcaattgggcggagaagcaccgccatatcaagtccgccagccgcgtgcttaaggactatgtgtccgccgtatcggtgggcgtgatcaacggcaccccgatgcttgacctgccatacattgaagacagtcaggccatgaccgacatgaacgtggccatgaccggttccggcaccttcatcgagattcagggcaccgcagaacaccgtccgttcaaccgtgccgaactcggcaccctgcttgacttggccgaaaagggcaacaaggaactgcaagccgcccagcgtgccgctttgtccctagactaagccagctccccttcctttaggggaggttgtcggctggaagccgtacggtctgcaatgtccagctcccctgacaaggggagccttcttaaaggagaacccatgcaaatcgtcgtcgcaacccataacgaaggcaagcttgtggaaatccgccgcattctcgaagaggatcttggcgcggatgccgaaaacatcgaactggtgtccgctggcagccttcacctgccggacccggtggaaaccggcgtcaccttccaggagaacgcgctgctcaaggcccgcgccgtggccatccgtaccggtctgcccgctgtagcggatgattcaggtctcatcgtcgatgtgatgggtaacgctccgggcattctgtctgctcgctgggcgggtgctcacggccacgacaaggccaataatgcgctgctgctcgcccaaatcgaagatattccggatgacaagcgtaccgcgcgcttccgttgcgccgccgcgctggtggtcccggacaccgagaccggtgccgacgtgaccggtggagtggctgccgacggcatcaccgtttacaccacggctgcagatgggagccctgccccggtgcatgcccggtacgccatcaagtcggagacagtggaactcggcgacatgccaggtcgtatcatccgcgaggctcgtggcgaacacggtttcggttacgatccgctgttcgtcccggacgaccagcctgccggtcgcgtcagcactgagcctgaccatgaaggcgagccgctgaccagcgccgaaatgactccggccgagaagaatgcgatttcccaccgaggcaaggcgctgaaagccttggtccccgctatcgaggcgctgctgcactaagtcgtctaggctgtctaactgcactgagccgcgactaagccacagttgagtcgcggctcagcaactcagcccctcccgaatcgggcaagtgtctagcaagcgcctatgacctagcaagggcgatacgaaagaaggccggcgcttagtgcgtcggccttcttgatgaacaagagccacccgatagaatcgaactaccgaccttcccacgaacgagggggatgctctaccactgagctaaggtggcgtggctccaagagccaagtagagaatatagcactgcgtttgattcaacgcaagccggacgttcagcatcttcgggccattgttctttgagccattgtggaggcaatagtgcgaacgatgtgcacacctcatctgctcggaccccattcgtcgtgtgcgcgttatgctagcatggtgagcctgattgactcggaggcagagggaagcatgcgtgattttgtgctggtgaagttgacagacgaagagttcgatgatttctccgccaggcatccacaaggcaatttccaacaaacctcggcgatgggacgccttcgcgccgcgcaggggatcgacgtcgaatatctggccctcaaggagggcgagaagatcgtcgcggcggcgctgttcgaaactcaccgctctcgattctctacatttgcggccatccatgatggcccgatgtgcgactatcacgacaccgaagcattgaccttcttcatggatgcgctgaaacgccatgccaaggcaaagggtgcttcacagctggaaatcacccctgaatccccgtatcggcttcgcgacaccaatggagcttctttgccggatgaccagaacggcgctcccgacaataagctgatagaacggctcgaggcgatcggcttcactcatggcggtttcaccgtgggctacacggcggttccacgttggcgctacctcaaggatctgaccggcattaccgatgagaaaagtctgctgaagtcctatgacaagcgcacccagtggagcgtgaagcgtgcccaatcgatgggtgtgcatgtgcgtgagctgtcggacgacgagttgggggtattcgcacgaatcgagcggcaaaccgccgaacgtcgtagcttcgaataccgtggcgaagcatatttccaccgtttcaaggaagcgtttggcaacaaggcgcattttatggttgccgagatccacatcgacgaatatgtagcggacatgacggccaagcgtgaagcgctttcggccaaggtggcggcattgaccgccaaaaacgccgaacaccccaccaccaaaaccgaacgtcagctgggggaggagacccgcaatctggcggcagccgaaaagcgcctgaacgaggcggccgagttcgccaaagacggggatgtgctgccggctgcggcatcactattcgtggagcatccgcgcgaggtcatctacctgttctccggtagcgtcgagcagtacaagcccttctacgcctccgcgctgattcagcatgacgcgatgctgcatttctgcgtggaacacgggctgtctcgctacaacttctacggcatcgacggcgtctttgatgatcccgatgacgaggggcgtggtgtactggagttcaagcagggcttcaacggatatgtcgaggaacttccgggcgagttcgtactgccggtcaaaccggtcgcctatgccatgaagcaatttgcgcacaagctgctgtcgcggtaaacggacgcagcacacaggccgttccagagcccagagtaacgatcagagtaacgacaagtaagaaggttcgattatgacgcaatccgatgcaggcgtcgcctcactcacccctaccaagatcactcctgccgagctggatgcgttctccgcagctcaagtgcaaggtagtttccagcagacctcgcagatggccgccatgggtgcgttcaacggtccggtggactatgtgggtgtcaagcgcggtgacaagctgattgccgcctgctacgtggtgtacacgcagtcccgtttcggtttggaaggctcggtctggtgcggaccgctgtgcgattatgacaatccacaggtggttgaggcgatgaccgaagccctgcgtcgttcggccaaggcccatcacgccatcagcgtatcctgctggccggccgcagtctaccgtctgcatgatctggacggcaagccgaccagcgacccggacaccacgatgatggacaacatggcccgcttcggttggaaacatggcggcttcaccgtgggctacgaatccgtggtgaaccgctggaacttcgtcaaggggcttgacggcattcataatgagaaggaactgctggcctcgttctccaagtaccgccgtaagaacatccgcatcgcccaggattccggtctgcgcgtgcgccggctggaacgcggcgaactgagcactttcgtcaagctgtgcgatatgagcgccgcgcgtcaaggcttcaagagccgcgatctggcctactatgagcgtctgttcgataccttcggcgacctgatcgagttcaaggtggtcgaaacccatttcgacgaatatctggacaccctgcaatccaagctgaatgcggcctccaaagacaagcgcaacctcgaacgcctgctccagcgcgcgcaacagcggccggaaggcacggccaagaagggtgcctccgacccggcaacgctggaaaagcgcatcgccaccgcagacaagaagatcacggcgctggaaaagaccatcggcgaagtcaatggcatcatcgcctcggacggcccggtcattccggtggaagccggtgtctacttctggcatccgaacgaggtcgtctgcctgtccagcggcgaggacgatcgtttcatggattactacccgtcttccctaatccacttcgaggcgatgcttgactgcatcgcccgtggcgtggagcgcttcaacttctacggcatttccggcattttcgacgccaacgatccttcctacggcgtctggcagttcaagactcgcttcggcggattcgtggaagagcttccgggcaagttcacgctgccggtggacggactgcgcttcggtgtatccgaagccgcacacaagctgctgcatcgctgacaaacagtggcgagcacggacacagaaataaggcacaggtgacgacgagatgagcgcgactgcgaatcgaacagatacgacgtatacgtttggcgtgattacgcccgaagagttcgaccggctttccgaagccacaagccagggcagctttcagcaatggtccgggcaggtccgtcttgccaagattcgtgggcatgaagccgaatgcgttggcgtgtgcgacgcatccggcaatctggtagccggctgcgtgattctgtacctcaatggtcgtttcggtgcagatggctccgtatatttcggccccatcggcattagcgatgatccggctctgctgcgggccataaccgaggcgattcgtgaatcggcccatcgccaccatgctgtttccgtggcatgctggcctaacgtcgcctaccgtctgtattcctcggacgggcagcccgacggcgagccgaacgatgcactgctgaccggattcaccgatgccggctggacgcatggcggattccataccggttatgacgtggtctgccagtggatgtacgtcaaggatctcaccggcatcaccaacggcaaggaactgctggcatcattcggcaaacgcgctcaatggagcgtcaagcgggcgcagtcgatgggcgtgcacgttcgcgaaatcggccccgacgagttcgacgtgttcgccgatatcgaacggcggaccggtgaacgccgcgggttcgcgacgcgcggcgcggactatttccgccagttcaagcaggcgtatggcgcggatgcgcatttcatgctcgcggaaatccacatcgccgaatatgtggcggatatgaccgccaagcgcgaggccttgcagaccaaggtcgcacagctgcagacgaaatacgatgaacgtccgaccacgcgcatcgaacgtcagctgggggaggaatcgcgcaatctcgcggccgccgacaagcgtctggctgaggtggagggatatgccaagaagggcgatgtgctgccggcagcggcttcaatgttcgtcagtcaccccaatgaggtggtctatcagtattccggttcgttggaggagtacaagccgttctacgcctcggcgctgattcagtacgaagcgatgctgcacctgtgtgtggaacagggtgtgagccgctacaacttctacggcatttccggcgtgttcgacgatccgaacgacgagggccgcggcgtgctggaattcaagcagggcttcaacggctacgtcgagcagatggtaggcaaattcacgttgccggtggacaagttccgcttcggcgtgagcaatctggcgcacaagctgctgcaccggtagcagctggcggccgggggacgaacctatgtgggctgcgtctcgcctgaccgtgtgcccgccgtgcgcccgtcgtgtgcctactcgcgcatttgctcacacgcccatcagcacgtgagcaaatgccatcatcaccagtgaaatcatcgcggtgattgccagcgagaagccggccagtttggcgttgccgagtactttgtcggtgaacagcgtggagaaaatggcgattggagccaacgcgcagatcaccatcacggcgcgaatcgaagccgagaacggcagcaggaaccacgagatcaacgcgaaggcgacactgaacggtatacgccaagcgatgacggccatgacttccttcacatcatgcttggactggggcaaatccatgagcatgcccaccatcagcatcgacaccagcgcgttggcgccgctcaacggctgggttatagaggcgatccaatcgggaatcttcacgttggcgacggtcaacgcgatcatgagcagatacgtgtcgaacggcaccgagccgaagaagctcttgccgatggtgcgcagcaatgcgcggcgggcaagccgtttggcgtcgcgatccttgggcttttcgtacggcaaggtgggaaccgaaccggcgtgttgttcggcaagtgttttgccgggccgaatatgcagcagttgctgggtgagcacattggtgccggcggccaccatcacgcagttgccgatatcgaacatcgcagccggcaccaccgcgcccgcaccccagaatgactggacgaccgggaaagagaaacaaccgagattgaagccggcgccattgagcatcaggaaggcgcggtcggtcacattgcgcttgcgggtggccagaaagatgaacacgatcgggataaaagcaaacaggaatgcgaataccgaaataagcagcagcgagatgtcatgcggattggtggcgaacgagtatacgatggcaccgggtagcacgatgttgaattccgcggtttgcaacacgcgataatccttctgcccgaacaggccgaaccgcttgaacagatagccggcgagaatgatcagcaataggccaaccggcgtaagaatggcggacatacacttctctccttggctcacacaggctcatggcgcacaggctcagacccacaatgctgtgaccattatatttgccgccttggcattgccatatgtagaggcgtccgcaagggcttgcaattgcctcacgcatatacgaagagcctcccggaatcgttggcgatccaatgtttccaggaggctcaagccggtgcgcgagatgggacttgaacccacacgtcaaagacacaggaacctaaatcctgcgcgtctaccaattccgccactcgcgcgtgcatatccgcgtttccacaggtgtggaagatatacaaaaccctaggccggacagccattacagaccagccagcctagggcatccgagccacttgtcagaatcgaactgacgacctgctcattacgagtgagccgctctaccgactgagctaaagtggcttggttcgcggaaggcatttcgccagccgcgcacaagaaattaagtataagacatctccgcgaaaagtccaatcggcggcttggcagttgtgtcgtgaccgctcggttgaagatgacggttgtgccgcgccgcgaactgttcgataatgcaaacgatggcaatccgacatcgctgactgatttttgttctgttcatgtccgaatttgtgagtattctgtttggtgatacggagcgcatccgagccgtgagcgaaggcgctccagtcactgatgaaaggaatggaatcctatggccatcaatccgcccgttgacgccacccagacccctgagtgggctgccctgcagaagcactatgacgagcttcaggccgaaggcgtgagcctcaagaagtggttcgctgaagacgccgagcgtgtcgacaagctgtccttcgacgccggcgacctgcacttcgatctgtccaagaacctgatcaagccggaaaccctccagctgttcgccaaccttgccaaggccgtcaagctcgatgagcgcaccaaggctatgtacaccggcgtgcacatcaacaacaccgaagaccgcgccgtgctgcacaccgcgctgcgccgcccggtcgaagacgagggcaagtacatcgtcgacggccaggacaccgtcaaggacgtgcgcgaggtgctcgaccgcatctacgccttcgccgacaaggtccgttccggcgagtggaccggtgtgaccggcaagaagatcgaaaccgtggtcaacatcggcatcggcggctccgacctgggccccgtcatggtgtacgaggccctcaagccgtacgccgacgcgggcatctccgcccgctacatctccaacatcgacccgaacgacctggccgagaagaccaagggcctcgacccggagaccaccctgttcatcatcgtctccaagaccttcaccaccctggagaccctgaccaacgcc
